(19) United States
(12) Patent Application Publication
(10) Pub. No.: US 2013/0150599 A1
(43) Pub. Date: Jun. 13, 2013

(54) Production of DHA and Other LC-PUFAs in Plants

(71) Applicants: Terence A. Walsh, Zionsville, IN (US); Ann Owens Merlo, Carmel, IN (US); Daniel Gachotte, Indianapolis, IN (US); Paul Gordon Roessler, Fort Myers, FL (US); Scott Bevan, Indianapolis, IN (US); Jerry M. Kuner, Longmont, CO (US); James G. Metz, Longmont, CO (US)

(72) Inventors: Terence A. Walsh, Zionsville, IN (US); Ann Owens Merlo, Carmel, IN (US); Daniel Gachotte, Indianapolis, IN (US); Paul Gordon Roessler, Fort Myers, FL (US); Scott Bevan, Indianapolis, IN (US); Jerry M. Kuner, Longmont, CO (US); James G. Metz, Longmont, CO (US)

(21) Appl. No.: 13/698,412

(22) PCT Filed: May 17, 2011
(86) PCT No.: PCT/US11/36869

§ 371 Date: Feb. 12, 2013

Related U.S. Application Data
(60) Provisional application No. 61/345,537, filed on May 17, 2010.

(51) Int. Cl. C12N 15/82

(52) U.S. Cl. CPC C12N 15/8247
USPC 554/9; 800/306; 435/419; 536/23.6; 435/320.1; 554/1; 554/223

(57) ABSTRACT

The invention provides recombinant host organisms (e.g., plants) genetically modified with a polyunsaturated fatty acid (PUFA) synthase system and one or more accessory proteins (e.g., PPTase and/or ACoAS) that allow for and/or improve the production of PUFAs in the host organism. The present invention also relates to methods of making and using such organisms (e.g., to obtain PUFAs) as well as products obtained from such organisms (e.g., oil and/or seed).

### BACKGROUND OF THE INVENTION

[0001] 1. Field of the Invention

[0002] The present invention generally relates to recombinant host organisms (e.g., plants) genetically modified with a polyunsaturated fatty acid (PUFA) synthase system and one or more accessory proteins that allow for and/or improve the production of PUFAs in the host organism. The present invention also relates to methods of making and using such organisms (e.g., to obtain PUFAs) as well as products obtained from such organisms (e.g., oil and seed).

[0003] 2. Background Art

[0004] Polyunsaturated fatty acids (PUFAs) are considered to be useful for nutritional applications, pharmaceutical applications, industrial applications, and other purposes. However, the current supply of PUFAs from natural sources (e.g., fish oils) and from chemical synthesis is not sufficient for long-term commercial needs.

[0005] Vegetable oils derived from plants (e.g., oil seed crops) are relatively inexpensive and do not have the contamination issues associated with fish oils. However, the PUFAs found in commercially-developed plants and plant oils do not typically include more saturated or longer-chain PUFAs, and only typically include fatty acids such as linoleic acid (eighteen carbons with 2 double bonds, in the delta 9 and 12 positions—18:2 delta 9,12) and linolenic acid (18:3 delta 9,12,15).

[0006] The production of more unsaturated or longer-chain PUFAs in plants by the modification of the fatty acids endogenously produced by plants has been described. For example, the genetic modification of plants with various individual genes encoding fatty acid elongases and/or desaturases has been described as resulting in the generation of leaves or seeds containing significant levels of longer-chain and more unsaturated PUFAs such as eicosapentaenoic acid (EPA), but also containing significant levels of mixed shorter-chain and less unsaturated PUFAs (Qi et al., Nature Biotech. 22:739 (2004); WO 04/071467; Abbadi et al., Plant Cell 16:1 (2004); Napier and Sayanova, Proceedings of the Nutrition Society 64:387-393 (2005); Robert et al., Functional Plant Biology 32:473-479 (2005); U.S. Appl. Pub. No. 2004/0172682).

[0007] The genus Brassica includes canola, one of the world's most important oilseed crops, and the most important oilseed crop grown in temperate geographies. Canola has been traditionally characterized as Brassica napus (a species derived as a result of inter-specific crosses of Brassica rapa and Brassica oleracea) in which erucic acid and glucosinolates have been eliminated or significantly reduced through conventional breeding. The majority of canola oil is in the form of vegetable oils produced for human consumption. There is also a growing market for the use of canola oil in industrial applications.

[0008] The quality of edible and industrial oil derived from a particular variety of canola seed is determined by its constituent fatty acids, as the type and amount of fatty acid unsaturation have implications for both dietary and industrial applications. Conventional canola oil contains about 60% oleic acid (C18:1), about 20% linoleic acid (C18:2) and about 10% linolenic acid (18:3). The levels of polyunsaturated linolenic acid typical of conventional canola are undesirable as the oil is easily oxidized, the rate of oxidation being affected by several factors, including the presence of oxygen, exposure to light and heat, and the presence of native or added antioxidants and pro-oxidants in the oil. Oxidation causes off-flavors and rancidity of as a result of repeated frying (induced oxidation) or storage for a prolonged period (auto-oxidation). Oxidation can also alter the lubricative and viscous properties of canola oil.

[0009] Oils exhibiting reduced levels of polyunsaturated fatty acids and increases in the level of monounsaturated oleic acid relative to conventional canola oil are associated with higher oxidative stability. The susceptibility of individual fatty acids to oxidation is dependent on their degree of unsaturation. Thus, the rate of oxidation of linolenic acid, which possesses three carbon-carbon double bonds, is 25 times that of oleic acid, which has only one double bond, and 2 times that of linoleic acid, which has two double bonds. Linoleic and linolenic acids also have the most impact on flavor and odor because they readily form hydroperoxides. High oleic oil (≧70% oleic acid) is less susceptible to oxidation during storage, frying and refining, and can be heated to a higher temperature without smoking, making it more suitable as cooking oil. Examples of commercially sold canola varieties having a fatty acid profile in seed oil of oleic acid (C18:1) above 70% (by weight) and linolenic acid (C18:3) below 3.5% (by weight) are the NEXERA™ varieties, marketed by Dow AgroSciences LLC (Indianapolis, Ind.), which varieties produce “Omega-9 oil,” a non-hydrogenated, high oleic acid, low linolenic acid oil currently used in numerous applications, including deep frying, sautéing, baking, spraying and in salad dressings, by restaurants and the foodservice industry.

### BRIEF SUMMARY OF THE INVENTION

[0010] There is a need in the art for a relatively inexpensive method to efficiently and effectively produce quantities (e.g., commercial quantities) of longer-chain or more unsaturated PUFAs in plants, plant seed or plant oil, as well as quantities of lipids (e.g., triacylglycerol (TAG) and phospholipid (PL)) enriched in such PUFAs in plants, plant seed or plant oil. A system for providing and improving PUFA production in host organisms (e.g., plants) by providing recombinant host organisms genetically modified with a polyunsaturated fatty acid (PUFA) synthase and one or more accessory proteins, as described herein, is a significant alternative to the approaches in the art.

[0011] The present invention is directed to genetically modified plants (e.g., Brassica), descendants, seeds, cells, tissues, or parts thereof, comprising (i) a nucleic acid sequence encoding a polyunsaturated fatty acid (PUFA) synthase system (e.g., an algal PUFA synthase system) that produces at least one PUFA; and (ii) a nucleic acid sequence encoding a phosphopantetheinyl transferase (PPTase) that transfers a phosphopantetheinyl cofactor to an PUFA synthase system (e.g., an algal PUFA synthase system) ACP domain. In some embodiments, the genetically modified plant, descendant, seed, cell, tissue, or part thereof is from an economically important Brassica species (e.g., Brassica napus or Brassica juncea). In some embodiments, the PUFA synthase system comprises an amino acid sequence that is at least 60% to 99% identical to the amino acid sequence of SEQ ID NO:1 or comprises the amino acid sequence of SEQ ID NO:1. In some embodiments, the nucleic acid sequence encoding the PUFA synthase system comprises a nucleic acid sequence at least 60% to 99% identical to the nucleic acid sequence of SEQ ID NO:6 or comprises the nucleic acid sequence of SEQ ID NO:6. In some embodiments, the PUFA synthase system comprises an amino acid sequence that is at least 60% to 99% identical to the amino acid sequence of SEQ ID NO:2 or comprises the amino acid sequence of SEQ ID NO:2. In some embodiments, the nucleic acid sequence encoding the PUFA synthase system comprises a nucleic acid sequence that is at least 60% to 99% identical to the nucleic acid sequence of SEQ ID NO:7 or comprises the nucleic acid sequence of SEQ ID NO:7. In some embodiments, the PUFA synthase system comprises an amino acid sequence that is at least 60% to 99% identical to the amino acid sequence of SEQ ID NO:3 or comprises the amino acid sequence of SEQ ID NO:3. In some embodiments, the nucleic acid sequence encoding the PUFA synthase system comprises a nucleic acid sequence that is at least 60% to 99% identical to the nucleic acid sequence of SEQ ID NO:8 or comprises the nucleic acid sequence of SEQ ID NO:8. In some embodiments, the PUFA synthase system comprises the amino acid sequence of SEQ ID NOs: 1, 2, or 3 or any combination thereof. In some embodiments, the nucleic acid sequence encoding the PUFA synthase system comprises the nucleic acid sequence of SEQ ID NOs: 6, 7 or 8 of any combination thereof.

[0012] In some embodiments, the PPTase comprises an amino acid sequence that is at least 60% to 99% identical to SEQ ID NO:5 or comprises the amino acid sequence of SEQ ID NO:5. In some embodiments, the nucleic acid sequence encoding the PPTase is at least 60% to 99% identical to the nucleic acid sequence of SEQ ID NO:10 or comprises the nucleic acid sequence of SEQ ID NO:10.

[0013] In some embodiments, the nucleic acid sequences of (i) and (ii) are contained in a single recombinant expression vector. In some embodiments, the nucleic acid sequences of (i) and (ii) are operably linked to a seed-specific promoter. In some embodiments, the nucleic acid sequences of (i) and (ii) are operably linked to a promoter selected from the group consisting of PvDlec2, PvPhaseolin, LfKCS3 and FAE1.

[0014] In some embodiments, the genetically modified plant (e.g., a Brassica species producing canola oil), descendant, seed, cell, tissue, or part thereof further comprises (iii) a nucleic acid sequence encoding an acyl-CoA synthetase (ACoAS) that catalyzes the conversion of long chain PUFA free fatty acids (PITA) to acyl-CoA. In some embodiments, the ACoAS comprises an amino acid sequence that is at least 60% to 99% identical to SEQ ID NO:4 or comprises the amino acid sequence of SEQ ID NO:4. In some embodiments, the ACoAS comprises a nucleic acid sequence that is at least 60% to 99% identical to the nucleic acid sequence of SEQ ID NO:9 or comprises the nucleic acid sequence of SEQ ID NO:9. In some embodiments, the nucleic acid sequence encoding the ACoAS comprises the nucleic acid sequence of SEQ ID NO:34. In some embodiments, the nucleic acid sequences of (i), (ii) and/or (iii) are contained in a single recombinant expression vector. In some embodiments, the nucleic acid sequences of (i), (ii) and/or (iii) are operably linked to a seed-specific promoter. In some embodiments, the nucleic acid sequences of (i), (ii) and/or (iii) are operably linked to a promoter selected from the group consisting of: PvDlec2, LfKCS3 and FAE 1.

[0015] In some embodiments, the genetically modified plant (e.g., Brassica), descendant, cell, tissue, or part thereof further comprises a nucleic acid sequence encoding an acetyl CoA carboxylase (ACCCase) and/or a nucleic acid sequence encoding a type 2 diacylglycerol acyltransferase (DGAT2).

[0016] The present invention is directed to an isolated nucleic acid molecule comprising a nucleic acid sequence selected from SEQ ID NOs: 6-10 and SEQ NO:34, a recombinant expression vector pDAB7361, a recombinant expression vector pDAB7362, a recombinant expression vector pDAB7363, a recombinant expression vector pDAB7365, a recombinant expression vector pDAB7368, a recombinant expression vector pDAB7369, a recombinant expression vector pDAB7370, a recombinant expression vector pDAB100518, a recombinant expression vector pDAB101476, recombinant expression vector pDAB9166, a recombinant expression vector pDAB9167, a recombinant expression vector pDAB7379, a recombinant expression vector pDAB7380, a recombinant expression vector pDAB9323, a recombinant expression vector pDAB9330, a recombinant expression vector pDAB9337, a recombinant expression vector pDAB9338, a recombinant expression vector pDAB9344, a recombinant expression vector pDAB9396, a recombinant expression vector pDAB101412, a recombinant expression vector pDAB7733, a recombinant expression vector pDAB7734, a recombinant expression vector pDAB101493, a recombinant expression vector pDAB109507, a recombinant expression vector pDAB109508, a recombinant expression vector pDAB109509, a recombinant expression vector pDAB9151, a recombinant expression vector pDAB108207, a recombinant expression vector pDAB108208, a recombinant expression vector pDAB108209, a recombinant expression vector pDAB9159, a recombinant expression vector pDAB9147, a recombinant expression vector pDAB108224, or a recombinant expression vector pDAB108225.

[0017] In some embodiments, a seed oil obtained from the genetically modified plant, descendant, seed, cell, tissue, or part thereof comprises detectable amounts of DHA (docosahexaenoic acid (C22:6, n-3)) and/or EPA (eicosapentaenoic acid (C20:5, n-3)). In some embodiments, the seed oil comprises 0.01% to 15% DHA, 0.05% to 10% DHA, or 0.05% to 5% DHA. In some embodiments, the seed oil comprises 0.01% to 5% EPA, 0.05% to 5% EPA, or 0.05% to 1% EPA. In other embodiments, the detectable amounts of DHA and/or EPA found in the seed oil are also found in grain and/or meal obtained from the genetically modified plant. In some embodiments, the detectable amounts of DHA and/or EPA are found seed oil of a Brassica species having a fatty acid content comprising, by weight, 70% or greater of oleic acid (C18:1) and/or 4% or lower linolenic acid (C18:3).

[0018] The present invention is directed to an oil or a seed obtained from a genetically modified plant (e.g., Brassica), descendant, cell, tissue, or part thereof described herein. The present invention is directed to a food product comprising an oil obtained from a genetically modified plant, descendant, cell, tissue, or part thereof described herein. The present invention is also directed to a functional food comprising an oil obtained from a genetically modified plant, descendant, cell, tissue, or part thereof described herein, or a seed obtained from a genetically modified plant, descendant, cell, tissue, or part thereof described herein. The present invention is directed to a pharmaceutical product comprising an oil obtained from a genetically modified plant, descendant, cell, tissue, or part described herein.

[0019] The present invention is directed to a method to produce an oil comprising at least one LC-PUFA, comprising recovering oil from a genetically modified plant (e.g., Brassica), descendant, cell, tissue, or part thereof described herein or from a seed of a genetically modified plant (e.g., Brassica), descendant, cell, tissue, or part thereof described herein. The present invention is also directed to a method to produce an oil comprising at least one LC-PUFA, comprising growing a genetically modified plants (e.g., Brassica), descendant, cell, tissue, or part thereof described herein. The present invention is also directed to a method to produce at least one LC-PUFA in a seed oil, comprising recovering oil from a seed of a genetically modified plant (e.g., Brassica), descendant, cell, tissue, or part thereof described herein.

[0020] The present invention is directed to a method to produce at least one PUFA in a seed oil, comprising growing a genetically modified plant (e.g., Brassica), descendant, cell, tissue, or part thereof described herein. The present invention is also directed to a method to provide a supplement or therapeutic product containing at least one PUFA to an individual, comprising providing to the individual a genetically modified plant (e.g., Brassica), descendant, cell, tissue, or part thereof of described herein, an oil described herein, a seed described herein, a food product described herein, a functional food described herein, or a pharmaceutical product described herein. In some embodiments, a PUFA contained in such embodiments is DHA and/or EPA.

[0021] The present invention is directed to a method to produce a genetically modified plant (e.g., Brassica), descendant, cell, tissue, or part thereof described herein, comprising transforming a plant or plant cell with (i) a nucleic acid sequence encoding a PUFA synthase system (e.g., an algal PUFA synthase system) that produces at least one polyunsaturated fatty acid (PUFA); and (ii) a nucleic acid sequence encoding a phosphopantetheinyl transferase (PPTase) that transfers a phosphopantetheinyl cofactor to an PUFA synthase system (e.g., an algal PUFA synthase system) ACP domain. In some embodiments, the method further comprises transforming the plant or plant cell with (iii) a nucleic acid sequence encoding an acyl-CoA synthetase (ACoAS) that catalyzes the conversion of long chain PUFA free fatty acids (FFA) to acyl-CoA.

### BRIEF DESCRIPTION OF DRAWINGS

[0022] The various embodiments of the invention can be more fully understood from the following detailed description, the figures, and the accompanying sequence descriptions, which form a part of this application.

[0023] FIG. 1 depicts the Clustal W (alignments in Vector NTI) of the redesigned DNA sequences encoding each of the 9 repeat domains of PUFA OrfA.

[0024] FIG. 2 shows the plasmid map of pDAB7361.

[0025] FIG. 3 shows the plasmid map of pDAB7362.

[0026] FIG. 4 shows the plasmid map of pDAB7363.

[0027] FIG. 5 shows single seed analysis of the DHA content of T₁ seeds from canola event 5197[14]-032.002.

[0028] FIG. 6 shows the results of SDS-PAGE western blots of extracts from late stage (>30 DAP) developing T1 seed from canola event 5197[14]-032.002 probed with Orf A, Orf B and Orf C specific antisera.

[0029] FIG. 7a shows the lipid content of developing T2 seed samples collected 15, 20, 25, 30, 35 and 42 days after pollination from the DHA-producing canola event 5197[14]-032.002.Sx002.

[0030] FIG. 7b shows the presence of the OrfA, OrfB and OrfC polypeptides in extracts from DHA-producing canola event 5197[14]-032.002.Sx002 by western blot.

[0031] FIG. 8 shows the LC-PUFA content of homozygous T2 plants from the greenhouse-grown T1 plants of canola event 5197[14]-032.002.

[0032] FIG. 9 shows a summary of the LC-PUFA of single T2 seed analyses from six homozygous lines.

[0033] FIG. 10 shows DHA content of the resulting parent and F1 hybrid seeds from a reciprocal cross of two T₁ lines and untransformed Omega-9 Nexera 710.

[0034] FIG. 11 shows pat gene copy number of sixty individual T1 plants derived from canola event 5197[13]-010.001.

[0035] FIG. 12 shows expression profiles of genes of interest in the null untransformed Omega-9 Nexera 710 line using the raw intensity values for each of the 6 time points expressed as days after pollination (DAP).

[0036] FIG. 13 shows expression profiles of genes of interest in the null untransformed Omega-9 Nexera 710 line using the normalized intensity values for each of the 6 time points expressed as DAP.

[0037] FIG. 14 shows expression profiles of genes of interest in the homozygote event 5197[14]-032.002 line using the raw intensity values for each of the 6 time points expressed as DAP.

[0038] FIG. 15 shows expression profiles of genes of interest in the homozygote event 5197[14]-032.002 line using the normalized intensity values for each of the 6 time points expressed as DAP.

[0039] FIG. 16 shows PUFA synthase activity in mature transgenic canola seed measured by thin layer chromatography (TLC).

[0040] FIG. 17 shows the calculated ratios of reference peptides to each other from OrfA expressed in E. coli with and without co-expressed HetI, and OrfA expressed in canola event 5197[14]-032.002.

[0041] FIG. 18 shows the calculated ratios of the apo2-9 peptide to each of six reference peptides from OrfA expressed in E. coli with and without HetI, and OrfA expressed in transgenic canola event 5197[14]-032.002.

[0042] FIG. 19 shows the plasmid map of pDAB7365.

[0043] FIG. 20 shows the plasmid map of pDAB7368.

[0044] FIG. 21 shows the plasmid map of pDAB7369.

[0045] FIG. 22 shows the plasmid map of pDAB7370.

[0046] FIG. 23 shows the plasmid map of pDAB100518.

[0047] FIG. 24 shows the plasmid map of pDAB101476.

[0048] FIG. 25 shows the plasmid map of pDAB101477.

[0049] FIG. 26 shows the plasmid map of pDAB9166.

[0050] FIG. 27 shows the plasmid map of pDAB9167.

[0051] FIG. 28 shows the plasmid map of pDAB7379.

[0052] FIG. 29 shows the plasmid map of pDAB7380.

[0053] FIG. 30 shows the plasmid map of pDAB9323.

[0054] FIG. 31 shows the plasmid map of pDAB9330.

[0055] FIG. 32 shows the plasmid map of pDAB9337.

[0056] FIG. 33 shows the plasmid map of pDAB9338.

[0057] FIG. 34 shows the plasmid map of pDAB9344.

[0058] FIG. 35 shows the plasmid map of pDAB9396.

[0059] FIG. 36 shows the plasmid map of pDAB101412.

[0060] FIG. 37 shows the plasmid map of pDAB7733.

[0061] FIG. 38 shows the plasmid map of pDAB7734.

[0062] FIG. 39 shows the plasmid map of pDAB101493.

[0063] FIG. 40 shows the plasmid map of pDAB109507.

[0064] FIG. 41 shows the plasmid map of pDAB109508.

[0065] FIG. 42 shows the plasmid map of pDAB109509.

[0066] FIG. 43 shows the plasmid map of pDAB9151.

[0067] FIG. 44 shows the plasmid map of pDAB108207.

[0068] FIG. 45 shows the plasmid map of pDAB108208.

[0069] FIG. 46 shows the plasmid map of pDAB108209.

[0070] FIG. 47 shows the plasmid map of pDAB9159.

[0071] FIG. 48 shows the plasmid map of pDAB9147.

[0072] FIG. 49 shows the plasmid map of pDAB108224.

[0073] FIG. 50 shows the plasmid map of pDAB108225.

[0074] FIG. 51 illustrates DHA and LC-PUFA content of T₂ seed from individual transgenic Arabidopsis events transformed with pDAB101493, pDAB7362, pDAB7369, pDAB101412 or pDAB7380.

### DETAILED DESCRIPTION OF THE INVENTION

[0075] The term “polyunsaturated fatty acid” or “PUFA” as used herein refers to fatty acids with a carbon chain length of at least 16 carbons, at least 18 carbons, at least 20 carbons, or 22 or more carbons, with at least 3 or more double bonds, 4 or more double bonds, 5 or more double bonds, or 6 or more double bonds, wherein all double bonds are in the cis configuration.

[0076] The term “long chain polyunsaturated fatty acids” or “LC-PUFAs” as used herein refers to fatty acids of 18 and more carbon chain length, 20 and more carbon chain length, containing 3 or more double bonds, or 22 or more carbons, with at least 3 or more double bonds, 4 or more double bonds, 5 or more double bonds, or 6 or more double bonds. LC-PUFAs of the omega-6 series include, but are not limited to, gamma-linolenic acid (C18:3), di-homo-gamma-linolenic acid (C20:3n-6), arachidonic acid (C20:4n-6), adrenic acid (also called docosatetraenoic acid or DTA) (C22:4n-6), and docosapentaenoic acid (C22:5n-6). LC-PUFAs of the omega-3 series include, but are not limited to, alpha-linolenic acid (C18:3), eicosatrienoic acid (C20:3n-3), eicosatetraenoic acid (C20:4n-3), eicosapentaenoic acid (C20:5n-3), docosapentaenoic acid (C22:5n-3), and docosahexaenoic acid (C22:6n-3). LC-PUFAs also include fatty acids with greater than 22 carbons and 4 or more double bonds including but not limited to, C28:8(n-3).

[0077] The terms “PUFA synthase” or “PUFA synthase system” or “SzPUFA” or “hSzThPUFA” as used herein refers to an enzyme system that produces polyunsaturated fatty acids (PUFAs) and particularly, long chain PUFAs (LC-PUFAs) as well as any domain of such an enzyme in a complex. The term PUFA synthase includes, but is not limited to, PUFA PKS systems or PKS-like systems for the production of PUFAs.

[0078] The term “phosphopantetheinyl transferase” or “PPTase” or “NoHetI” as used herein refers to an enzyme which activates a PUFA synthase system by transferring a cofactor (e.g., 4-phosphopantetheine) from coenzyme A (CoA) to one or more ACP domain present in the PUFA synthase system.

[0079] The term “acyl-CoA synthetase” or “ACoAS” or “SzACS-2” as used herein refers to an enzyme that catalyzes the conversion of long chain polyunsaturated free fatty acids (FFA) to acyl-CoA.

[0080] The term “plant” as used herein includes, but is not limited to, any descendant, cell, tissue, or part of a plant.

[0081] “Nutraceutical” means a product isolated, purified, concentrated, or produced from plants that provides a physiological benefit or provides protection against disease, including processed foods supplemented with such products, along with foods produced from crops that have been genetically engineered to contain enhanced levels of such physiologically-active components.

[0082] “Functional food” means a food that (a) is similar in appearance to or can be a conventional food that is consumed as part of a usual diet and (b) has enhanced nutritional value and/or specific dietary benefits based on a modification in the proportion of components that typically exist in the unmodified food.

[0083] The terms “polynucleotide” and “nucleic acid” are intended to encompass a singular nucleic acid as well as plural nucleic acids, a nucleic acid molecule or fragment, variant, or derivative thereof, or construct, e.g., messenger RNA (mRNA) or plasmid DNA (pDNA). A polynucleotide or nucleic acid can contain the nucleotide sequence of the full-length cDNA sequence, or a fragment thereof, including the untranslated 5′ and 3′ sequences and the coding sequences. A polynucleotide or nucleic acid can be composed of any polyribonucleotide or polydeoxyribonucleotide, which can be unmodified RNA or DNA or modified RNA or DNA. For example, a polynucleotide or nucleic acid can be composed of single- and double-stranded DNA, DNA that is a mixture of single- and double-stranded regions, single- and double-stranded RNA, and RNA that is mixture of single- and double-stranded regions, hybrid molecules comprising DNA and RNA that can be single-stranded or, more typically, double-stranded or a mixture of single- and double-stranded regions. These terms also embraces chemically, enzymatically, or metabolically modified forms of a polynucleotide or nucleic acid.

[0084] A polynucleotide or nucleic acid sequence can be referred to as “isolated,” in which it has been removed from its native environment. For example, a heterologous polynucleotide or nucleic acid encoding a polypeptide or polypeptide fragment having dihydroxy-acid dehydratase activity contained in a vector is considered isolated for the purposes of the present invention. Further examples of an isolated polynucleotide or nucleic acid include recombinant polynucleotides maintained in heterologous host cells or a purified (partially or substantially) polynucleotide or nucleic acid in solution. An isolated polynucleotide or nucleic acid according to the present invention further includes such molecules produced synthetically. An isolated polynucleotide or nucleic acid in the form of a polymer of DNA can be comprised of one or more segments of cDNA, genomic DNA or synthetic DNA.

[0085] The term “gene” refers to a nucleic acid or fragment thereof that is capable of being expressed as a specific protein, optionally including regulatory sequences preceding (5′ non-coding sequences) and following (3′ non-coding sequences) the coding sequence.

[0086] As used herein, the term “coding region” refers to a DNA sequence that codes for a specific amino acid sequence. “Suitable regulatory sequences” refer to nucleotide sequences located upstream (5′ non-coding sequences), within, or downstream (3′ non-coding sequences) of a coding sequence, and which influence the transcription, RNA processing or stability, or translation of the associated coding sequence. Regulatory sequences can include promoters, translation leader sequences, introns, polyadenylation recognition sequences, RNA processing site, effector binding site, and stem-loop structure.

[0087] As used herein, the terms “polypeptide” is intended to encompass a singular “polypeptide” as well as plural “polypeptides” and fragments thereof, and refers to a molecule composed of monomers (amino acids) linearly linked by amide bonds (also known as peptide bonds). The term “polypeptide” refers to any chain or chains of two or more amino acids, and does not refer to a specific length of the product. Thus, peptides, dipeptides, tripeptides, oligopeptides, protein, amino acid chain, or any other term used to refer to a chain or chains of two or more amino acids, are included within the definition of “polypeptide,” and the term “polypeptide” can be used instead of, or interchangeably with any of these terms. A polypeptide can be derived from a natural biological source or produced by recombinant technology, but is not necessarily translated from a designated nucleic acid sequence. It can be generated in any manner, including by chemical synthesis.

[0088] By an “isolated” polypeptide or a fragment, variant, or derivative thereof is intended a polypeptide that is not in its natural milieu. No particular level of purification is required. For example, an isolated polypeptide can be removed from its native or natural environment. Recombinantly produced polypeptides and proteins expressed in host cells are considered isolated for purposed of the invention, as are native or recombinant polypeptides which have been separated, fractionated, or partially or substantially purified by any suitable technique.

[0089] As used herein, “native” refers to the form of a polynucleotide, gene or polypeptide as found in nature with its own regulatory sequences, if present.

[0090] As used herein, “endogenous” refers to the native form of a polynucleotide, gene or polypeptide in its natural location in the organism or in the genome of an organism. “Endogenous polynucleotide” includes a native polynucleotide in its natural location in the genome of an organism. “Endogenous gene” includes a native gene in its natural location in the genome of an organism. “Endogenous polypeptide” includes a native polypeptide in its natural location in the organism.

[0091] As used herein, “heterologous” refers to a polynucleotide, gene or polypeptide not normally found in the host organism but that is introduced into the host organism. “Heterologous polynucleotide” includes a native coding region, or portion thereof, that is reintroduced into the source organism in a form that is different from the corresponding native polynucleotide. “Heterologous gene” includes a native coding region, or portion thereof, that is reintroduced into the source organism in a form that is different from the corresponding native gene. For example, a heterologous gene can include a native coding region that is a portion of a chimeric gene including non-native regulatory regions that is reintroduced into the native host. “Heterologous polypeptide” includes a native polypeptide that is reintroduced into the source organism in a form that is different from the corresponding native polypeptide.

[0092] As used herein, the term “modification” refers to a change in a polynucleotide disclosed herein that results in reduced, substantially eliminated or eliminated activity of a polypeptide encoded by the polynucleotide, as well as a change in a polypeptide disclosed herein that results in reduced, substantially eliminated or eliminated activity of the polypeptide. Such changes can be made by methods well known in the art, including, but not limited to, deleting, mutating (e.g., spontaneous mutagenesis, random mutagenesis, mutagenesis caused by mutator genes, or transposon mutagenesis), substituting, inserting, down-regulating, altering the cellular location, altering the state of the polynucleotide or polypeptide (e.g., methylation, phosphorylation or ubiquitination), removing a cofactor, introduction of an antisense RNA/DNA, introduction of an interfering RNA/DNA, chemical modification, covalent modification, irradiation with UV or X-rays, homologous recombination, mitotic recombination, promoter replacement methods, and/or combinations thereof. Guidance in determining which nucleotides or amino acid residues can be modified, can be found by comparing the sequence of the particular polynucleotide or polypeptide with that of homologous polynucleotides or polypeptides, e.g., yeast or bacterial, and maximizing the number of modifications made in regions of high homology (conserved regions) or consensus sequences.

[0093] The term “derivative,” as used herein, refers to a modification of a sequence disclosed in the present invention. Illustrative of such modifications would be the substitution, insertion, and/or deletion of one or more bases relating to a nucleic acid sequence of a coding sequence disclosed herein that preserve, slightly alter, or increase the function of a coding sequence disclosed herein in oil seed crop species. Such derivatives can be readily determined by one skilled in the art, for example, using computer modeling techniques for predicting and optimizing sequence structure. The term “derivative” thus also includes nucleic acid sequences having substantial sequence homology with the disclosed coding sequences herein such that they are able to have the disclosed functionalities for use in producing LC-PUFAs of the present invention.

[0094] As used herein, the term “variant” refers to a polypeptide differing from a specifically recited polypeptide of the invention by amino acid insertions, deletions, mutations, and substitutions, created using, e.g., recombinant DNA techniques, such as mutagenesis, Guidance in determining which amino acid residues can be replaced, added, or deleted without abolishing activities of interest, can be found by comparing the sequence of the particular polypeptide with that of homologous polypeptides and minimizing the number of amino acid sequence changes made in regions of high homology (conserved regions) or by replacing amino acids with consensus sequences.

[0095] Alternatively, recombinant polynucleotide variants encoding these same or similar polypeptides can be synthesized or selected by making use of the “redundancy” in the genetic code. Various codon substitutions, such as silent changes which produce various restriction sites, can be introduced to optimize cloning into a plasmid or viral vector for expression. Mutations in the polynucleotide sequence can be reflected in the polypeptide or domains of other peptides added to the polypeptide to modify the properties of any part of the polypeptide.

[0096] Amino acid “substitutions” can be the result of replacing one amino acid with another amino acid having similar structural and/or chemical properties, conservative amino acid replacements, or they can be the result of replacing one amino acid with an amino acid having different structural and/or chemical properties, i.e., non-conservative amino acid replacements. “Conservative” amino acid substitutions can be made on the basis of similarity in polarity, charge, solubility, hydrophobicity, hydrophilicity, or the amphipathic nature of the residues involved. For example, nonpolar (hydrophobic) amino acids include alanine, leucine, isoleucine, valine, proline, phenylalanine, tryptophan, and methionine; polar neutral amino acids include glycine, serine, threonine, cysteine, tyrosine, asparagine, and glutamine; positively charged (basic) amino acids include arginine, lysine, and histidine; and negatively charged (acidic) amino acids include aspartic acid and glutamic acid. Alternatively, “non-conservative” amino acid substitutions can be made by selecting the differences in polarity, charge, solubility, hydrophobicity, hydrophilicity, or the amphipathic nature of any of these amino acids. “Insertions” or “deletions” can be within the range of variation as structurally or functionally tolerated by the recombinant proteins. The variation allowed can be experimentally determined by systematically making insertions, deletions, or substitutions of amino acids in a polypeptide molecule using recombinant DNA techniques and assaying the resulting recombinant variants for activity.

[0097] The term “promoter” refers to a DNA sequence capable of controlling the expression of a coding sequence or functional RNA. In general, a coding sequence is located 3′ to a promoter sequence. Promoters can be derived in their entirety from a native gene, or be composed of different elements derived from different promoters found in nature, or even comprise synthetic DNA segments. It is understood by those skilled in the art that different promoters can direct the expression of a gene in different tissues or cell types, or at different stages of development, or in response to different environmental or physiological conditions. Promoters which cause a gene to be expressed in most cell types at most times are commonly referred to as “constitutive promoters.” It is further recognized that since in most cases the exact boundaries of regulatory sequences have not been completely defined, DNA fragments of different lengths can have identical promoter activity.

[0098] The term “operably linked” refers to the association of nucleic acid sequences on a single nucleic acid fragment so that the function of one is affected by the other. For example, a promoter is operably linked with a coding sequence when it is capable of effecting the expression of that coding sequence (e.g., that the coding sequence is under the transcriptional control of the promoter). Coding sequences can be operably linked to regulatory sequences in sense or antisense orientation.

[0099] The term “expression,” as used herein, refers to the transcription and stable accumulation of sense (mRNA) or antisense RNA derived from the nucleic acid fragment of the invention. Expression can also refer to translation of mRNA into a polypeptide.

[0100] The term “overexpression” as used herein, refers to expression that is higher than endogenous expression of the same or related gene. A heterologous gene is overexpressed if its expression is higher than that of a comparable endogenous gene.

[0101] As used herein, the term “transformation” refers to the transfer of a nucleic acid or fragment into a host organism, resulting in genetically stable inheritance. Host organisms containing the transformed nucleic acid fragments are referred to as “transgenic” or “recombinant” or “transformed” organisms.

[0102] The terms “plasmid” and “vector” as used herein refer to an extra chromosomal element often carrying genes which are not part of the central metabolism of the cell, and usually in the form of circular double-stranded DNA molecules. Such elements can be autonomously replicating sequences, genome integrating sequences, phage or nucleotide sequences, linear or circular, of a single- or double-stranded DNA or RNA, derived from any source, in which a number of nucleotide sequences have been joined or recombined into a unique construction which is capable of introducing a promoter fragment and DNA sequence for a selected gene product along with appropriate 3′ untranslated sequence into a cell.

[0103] As used herein, the term “codon degeneracy” refers to the nature in the genetic code permitting variation of the nucleotide sequence without affecting the amino acid sequence of an encoded polypeptide. The skilled artisan is well aware of the “codon-bias” exhibited by a specific host cell in usage of nucleotide codons to specify a given amino acid. Therefore, when synthesizing a gene for improved expression in a host cell, it is desirable to design the gene such that its frequency of codon usage approaches the frequency of preferred codon usage of the host cell.

[0104] The term “codon-optimized” as it refers to genes or coding regions of nucleic acid molecules for transformation of various hosts refers to the alteration of codons in the gene or coding regions of the nucleic acid molecules to reflect the typical codon usage of the host organism without altering the polypeptide encoded by the DNA. Such optimization includes replacing at least one, or more than one, or a significant number, of codons with one or more codons that are more frequently used in the genes of that organism.

[0105] Deviations in the nucleotide sequence that comprise the codons encoding the amino acids of any polypeptide chain allow for variations in the sequence coding for the gene. Since each codon consists of three nucleotides, and the nucleotides comprising DNA are restricted to four specific bases, there are 64 possible combinations of nucleotides, 61 of which encode amino acids (the remaining three codons encode signals ending translation). The “genetic code” which shows which codons encode which amino acids is reproduced herein as Table 1. As a result, many amino acids are designated by more than one codon. For example, the amino acids alanine and proline are coded for by four triplets, serine and arginine by six, whereas tryptophan and methionine are coded by just one triplet. This degeneracy allows for DNA base composition to vary over a wide range without altering the amino acid sequence of the proteins encoded by the DNA.

TABLE 1
The Standard Genetic Code

| | T | C | A | G |
|---|---|---|---|---|
| T | TTT Phe (F) | TCT Ser (S) | TAT Tyr (Y) | TGT Cys (C) |
| | TTC Phe (F) | TCC Ser (S) | TAC Tyr (Y) | TGC |
| | TTA Leu (L) | TCA Ser (S) | TAA Stop | TGA Stop |
| | TTG Leu (L) | TCG Ser (S) | TAG Stop | TGG Trp (W) |
| C | CTT Leu (L) | CCT Pro (P) | CAT His (H) | CGT Arg (R) |
| | CTC Leu (L) | CCC Pro (P) | CAC His (H) | CGC Arg (R) |
| | CTA Leu (L) | CCA Pro (P) | CAA Gln (Q) | CGA Arg (R) |
| | CTG Leu (L) | CCG Pro (P) | CAG Gln (Q) | CGG Arg (R) |
| A | ATT Ile (I) | ACT Thr (T) | AAT Asn (N) | AGT Ser (S) |
| | ATC Ile (I) | ACC Thr (T) | AAC Asn (N) | AGC Ser (S) |
| | ATA Ile (I) | ACA Thr (T) | AAA Lys (K) | AGA Arg (R) |
| | ATG Met (M) | ACG Thr (T) | AAG Lys (K) | AGG Arg (R) |
| G | GTT Val (V) | CGT Ala (A) | GAT Asp (D) | GGT Gly (G) |
| | GTC Val (V) | GCC Ala (A) | GAC Asp (D) | GGC Gly (G) |
| | GTA Val (V) | GCA Ala (A) | GAA Glu (E) | GGA Gly (G) |
| | GTG Val (V) | GCG Ala (A) | GAG Glu (E) | GGG Gly (G) |

[0106] Many organisms display a bias for use of particular codons to code for insertion of a particular amino acid in a growing peptide chain. Codon preference, or codon bias, differences in codon usage between organisms, is afforded by degeneracy of the genetic code, and is well documented among many organisms. Codon bias often correlates with the efficiency of translation of messenger RNA (mRNA), which is in turn believed to be dependent on, inter alia, the properties of the codons being translated and the availability of particular transfer RNA (tRNA) molecules. The predominance of selected tRNAs in a cell is generally a reflection of the codons used most frequently in peptide synthesis. Accordingly, genes can be tailored for optimal gene expression in a given organism based on codon optimization.

[0107] Given the large number of gene sequences available for a wide variety of animal, plant and microbial species, it is possible to calculate the relative frequencies of codon usage. Codon usage tables are readily available and can be adapted in a number of ways. See Nakamura et al. Nucl. Acids Res. 28:292 (2000). By utilizing this or similar tables, one of ordinary skill in the art can apply the frequencies to any given polypeptide sequence, and produce a nucleic acid fragment of a codon-optimized coding region which encodes the polypeptide, but which uses codons optimal for a given species. The present invention pertains to codon optimized forms of OrfA, OrfB, chimeric OrfC, PPTase and/or other accessory proteins of the invention, as described further herein.

[0108] The term “percent identity,” as known in the art, is a relationship between two or more polypeptide sequences or two or more polynucleotide sequences, as determined by comparing the sequences. In the art, “identity” also means the degree of sequence relatedness between polypeptide or polynucleotide sequences, as the case can be, as determined by the match between strings of such sequences. “Identity” and “similarity” can be readily calculated by known methods, including but not limited to those disclosed in: 1) Computational Molecular Biology (Lesk, A. M., Ed.) Oxford University: NY (1988); 2) Biocomputing: Informatics and Genome Projects (Smith, D. W., Ed.) Academic: NY (1993); 3) Computer Analysis of Sequence Data, Part I (Griffin, A. M., and Griffin, H. G., Eds.) Humania: NJ (1994); 4) Sequence Analysis in Molecular Biology (von Heinje, G., Ed.) Academic (1987); and 5) Sequence Analysis Primer (Gribskov, M. and Devereux, J., Eds.) Stockton: NY (1991).

[0109] Methods to determine identity are designed to give the best match between the sequences tested. Methods to determine identity and similarity are codified in publicly available computer programs. Sequence alignments and percent identity calculations can be performed, for example, using the AlignX program of the Vector NTI® suite (Invitrogen, Carlsbad, Calif.) or MegAlign™ program of the LASERGENE bioinformatics computing suite (DNASTAR Inc., Madison, Wis.). Multiple alignment of the sequences is performed using the “Clustal method of alignment” which encompasses several varieties of the algorithm including the “Clustal V method of alignment” corresponding to the alignment method labeled Clustal V (disclosed by Higgins and Sharp, CABIOS. 5:151-153 (1989); Higgins, D. G. et al., Comput. Appl. Biosci., 8:189-191 (1992)) and found in the MegAlign™ program of the LASERGENE bioinformatics computing suite (DNASTAR Inc.). For multiple alignments, the default values correspond to GAP PENALTY=10 and GAP LENGTH PENALTY=10. Default parameters for pairwise alignments and calculation of percent identity of protein sequences using the Clustal method are KTUPLE=1, GAP PENALTY=3, WINDOW=5 and DIAGONALS SAVED=5. For nucleic acids these parameters are KTUPLE=2, GAP PENALTY=5, WINDOW=4 and DIAGONALS SAVED=4. After alignment of the sequences using the Clustal V program, it is possible to obtain a “percent identity” by viewing the “sequence distances” table in the same program. Additionally the “Clustal W method of alignment” is available and corresponds to the alignment method labeled Clustal W (described by Higgins and Sharp, CABIOS. 5:151-153 (1989); Higgins, D. G. et al., Comput. Appl. Biosci. 8:189-191 (1992)) and found in the MegAlign™ v6.1 program of the LASERGENE bioinformatics computing suite (DNASTAR Inc.). Default parameters for multiple alignment (GAP PENALTY=10, GAP LENGTH PENALTY=0.2, Delay Divergen Seqs(%)=30, DNA Transition Weight=0.5, Protein Weight Matrix=Gonnet Series, DNA Weight Matrix=IUB). After alignment of the sequences using the Clustal W program, it is possible to obtain a “percent identity” by viewing the “sequence distances” table in the same program.

[0110] It is well understood by one skilled in the art that many levels of sequence identity are useful in identifying polypeptides, from other species, wherein such polypeptides have the same or similar function or activity. Useful examples of percent identities include, but are not limited to: 60%, 65%, 70%, 75%, 80%, 85%, 90%, or 95%, or any integer percentage from 60% to 100% can be useful in describing the present invention, such as 60%, 61%, 62%, 63%, 64%, 65%, 66%, 67%, 68%, 69%, 70%, 71%, 72%, 73%, 74%, 75%, 76%, 77%, 78%, 79%, 80%, 81%, 82%, 83%, 84%, 85%, 86%, 87%, 88%, 89%, 90%, 91%, 92%, 93%, 94%, 95%, 96%, 97%, 98% or 99%. Suitable nucleic acid fragments not only have the above homologies but typically encode a polypeptide having at least 50 amino acids, at least 100 amino acids, at least 150 amino acids, at least 200 amino acids, and at least 250 amino acids.

[0111] The term “sequence analysis software” refers to any computer algorithm or software program that is useful for the analysis of nucleotide or amino acid sequences. “Sequence analysis software” can be commercially available or independently developed. Typical sequence analysis software will include, but is not limited to: 1.) the GCG suite of programs (Wisconsin Package Version 9.0, Genetics Computer Group (GCG), Madison, Wis.); 2.) BLASTP, BLASTN, BLASTX (Altschul et al., J. Mol. Biol., 215:403-410 (1990)); 3.) DNASTAR (DNASTAR, Inc. Madison, Wis.); 4.) Sequencher (Gene Codes Corporation, Ann Arbor, Mich.); and 5.) the FASTA program incorporating the Smith-Waterman algorithm (W. R. Pearson, Comput. Methods Genome Res., [Proc. Int. Symp.] (1994), Meeting Date 1992, 111-20. Editor(s): Suhai, Sandor. Plenum: New York, N.Y.). Within the context of this application it will be understood that where sequence analysis software is used for analysis, that the results of the analysis will be based on the “default values” of the program referenced, unless otherwise specified. As used herein “default values” will mean any set of values or parameters that originally load with the software when first initialized.

[0112] Standard recombinant DNA and molecular cloning techniques used here are well known in the art and are described, e.g., by Sambrook et al., Molecular Cloning: A Laboratory Manual, Third Edition, Cold Spring Harbor Laboratory Press, Cold Spring Harbor, N.Y. (2000); and by Silhavy et al., Experiments with Gene Fusions, Cold Spring Harbor Laboratory Press, Cold Spring Harbor, N.Y. (1984); and by Ausubel et al., Current Protocols in Molecular Biology, published by Greene Publishing Assoc. and Wiley-Interscience (1987 to present).

[0113] The genetic manipulations of a recombinant hosts disclosed herein can be performed using standard genetic techniques and screening and can be made in any host cell that is suitable to genetic manipulation. In some embodiments, a recombinant host cell disclosed herein can be any organism or microorganism host useful for genetic modification and recombinant gene expression. In some embodiments, a recombinant host can be but is not limited to any higher plant, including both dicotyledonous and monocotyledonous plants, and consumable plants, including crop plants and plants used for their oils. Thus, any plant species or plant cell can be selected as described further below.

[0114] Oils of the present invention can be obtained from canola cultivars producing DHA and/or EPA in seed oil of a Brassica species where the oils have a fatty acid content comprising, by weight, 70% or greater of oleic acid (C18:1) and/or 4% or lower linolenic acid (C18:3). Such oils are heart healthy and have increased stability for foodservice and consumer packaged goods applications. Such oils also reduce the need for hydrogenation and provide nutritional advantages relative to soy, palm and many other oils used by the food industry. The oxidative stability of such oils can be further increased by the addition of antioxidants and processing additives known in the art.

[0115] The oils of the present invention can also be used in non-culinary or dietary processes and compositions. Some of these uses can be industrial, cosmetic or medical. Oils of the present invention can also be used in any application for which the oils of the present invention are suited. In general, the oils of the present invention can be used to replace, e.g., mineral oils, esters, fatty acids, or animal fats in a variety of applications, such as lubricants, lubricant additives, metal working fluids, hydraulic fluids and fire resistant hydraulic fluids. The oils of the present invention can also be used as materials in a process of producing modified oils. Examples of techniques for modifying oils of the present invention include fractionation, hydrogenation, alteration of the oil's oleic acid or linolenic acid content, and other modification techniques known to those of skill in the art.

[0116] Examples of cosmetic uses for oils of the present invention include use as an emollient in a cosmetic composition; as a petroleum jelly replacement; as comprising part of a soap, or as a material in a process for producing soap; as comprising part of an oral treatment solution; as comprising part of an ageing treatment composition; and as comprising part of a skin or hair aerosol foam preparation.

[0117] Additionally, the oils of the present invention can be used in medical applications. For example, oils of the present invention can be used in a protective barrier against infection and oils high in omega-9 fatty acids can be used to enhance transplant graft survival (U.S. Pat. No. 6,210,700).

[0118] It should be understood that the foregoing are non-limiting examples of non-culinary uses for which the oils of the present invention are suited. As previously stated, oils and modified oils of the present invention can be used to replace, e.g., mineral oils, esters, fatty acids, or animal fats in all applications known to those of skill in the art.

### PUFA Synthase System

[0119] The “standard” or “classical” pathway for synthesis of long chain. PUFAs (LC-PUFAs) in eukaryotic organisms involves the elongation and desaturation of medium chain-length saturated or mono-unsaturated fatty acids and has been described. The pathway for synthesis of long chain PUFAs via a PUFA synthase system has also been described and is very different from the “standard” pathway. Specifically, PUFA synthases utilize malonyl-CoA as a carbon source and produce the final PUFA without releasing intermediates in any significant amount. Also, with PUFA synthases, the appropriate cis double bonds are added during the synthesis using a mechanism that does not require oxygen. In some embodiments, NADPH is used as a reductant during the synthesis cycles.

[0120] The present invention relates to host organisms (e.g., plants) that have been genetically modified to express a PUFA synthase system (either endogenously or by genetic manipulation). In some embodiments, an organism that has been genetically modified to express a PUFA synthase system, wherein the organism does not naturally (endogenously, without genetic modification) express such a system, or at least that particular PUFA synthase or portion thereof with which the organism is being genetically modified, can be referred to herein as a “heterologous” host organism with regard to the modification of the organism with the PUFA synthase or with another protein that is not endogenously expressed by the organism. The genetic modifications of the present invention can be used to improve PUFA production in a host organism that endogenously expresses a PUFA synthase system, where the organism is not further modified with a different PUFA synthase or a portion thereof.

[0121] A PUFA synthase system according to the present invention can comprise several multifunctional proteins (and can include single function proteins, particularly for PUFA synthase systems from marine bacteria) that can act together to conduct both iterative processing of the fatty acid chain as well non-iterative processing, including trans-cis isomerization and enoyl reduction reactions in selected cycles. These proteins can also be referred to herein as the core PUFA synthase enzyme complex or the core PUFA synthase system. The general functions of the domains and motifs contained within these proteins are individually known in the art and have been described in detail with regard to various PUFA synthase systems from marine bacteria and eukaryotic organisms (see, e.g., U.S. Pat. No. 6,140,486; U.S. Pat. No. 6,566,583; Metz et al., Science 293:290-293 (2001); U.S. Appl. Pub. No. 2002/0194641; U.S. Appl. Pub. No. 2004/0235127; U.S. Appl. Pub. No. 2005/0100995, and WO 2006/135866). The domains can be found as a single protein (e.g., the domain and protein are synonymous) or as one of two or more (multiple) domains in a single protein, as mentioned above. The domain architecture of various PUFA synthases from marine bacteria and members of Thraustochytrium, and the structural and functional characteristics of genes and proteins comprising such PUFA synthases, have been described (see, e.g., U.S. Pat. No. 6,140,486; U.S. Pat. No. 6,566,583; Metz et al., Science 293:290-293 (2001); U.S. Appl. Pub. No. 2002/0194641; U.S. Appl. Pub. No. 2004/0235127; U.S. Appl. Pub. No. 2005/0100995 and WO 2006/135866).

[0122] Numerous examples of polynucleotides, genes and polypeptides having PUFA synthase activity are known in the art and can be used in a genetically modified host disclosed herein. PUFA synthase proteins or domains that are useful in the present invention can include both bacterial and non-bacterial PUFA synthases. A non-bacterial PUFA synthase is a system that is from or derived from an organism that is not a bacterium, such as a eukaryote. Bacterial PUFA synthases are described, for example, in U.S. Appl. Pub. No. 2008/0050505. Genetically modified plants of the invention can be produced which incorporate non-bacterial PUFA synthase functional domains with bacterial PUFA synthase functional domains, as well as PUFA synthase functional domains or proteins from other PKS systems (Type I iterative or modular, Type II, or Type III) or FAS systems.

[0123] In some embodiments, a PUFA synthase system of the present invention comprises at least the following biologically active domains that are typically contained on three or more proteins (a) at least one enoyl-ACP reductase (ER) domain; (b) multiple acyl carrier protein (ACP) domain(s) (e.g., at least from one to four, and preferably at least five ACP domains, and in some embodiments up to six, seven, eight, nine, ten, or more than ten ACP domains); (c) at least two β-ketoacyl-ACP synthase (KS) domains; (d) at least one acyltransferase (AT) domain; (e) at least one β-ketoacyl-ACP reductase (KR) domain; (f) at least two FabA-like β-hydroxyacyl-ACP dehydrase (DH) domains; (g) at least one chain length factor (CLF) domain; (h) at least one malonyl-CoA:ACP acyltransferase (MAT) domain. In some embodiments, a PUFA synthase system according to the present invention also comprises at least one region containing a dehydratase (DH) conserved active site motif.

[0124] In some embodiments, a PUFA synthase system comprises at least the following biologically active domains (a) at least one enoyl-ACP reductase (ER) domain; (b) at least five acyl carrier protein (ACP) domains; (c) at least two β-ketoacyl-ACP synthase (KS) domains; (d) at least one acyltransferase (AT) domain; (e) at least one β-ketoacyl-ACP reductase (KR) domain; (f) at least two FabA-like β-hydroxyacyl-ACP dehydrase (DH) domains; (g) at least one chain length factor (CLF) domain; and (h) at least one malonyl-CoA:ACP acyltransferase (MAT) domain. In some embodiments, a PUFA synthase system according to the present invention also comprises at least one region or domain containing a dehydratase (DH) conserved active site motif that is not a part of a FabA-like DH domain. The structural and functional characteristics of each of these domains are described in detail in U.S. Appl. Pub. No. 2002/0194641; U.S. Appl. Pub. No. 2004/0235127; U.S. Appl. Pub. No. 2005/0100995; U.S. Appl. Pub. No. 2007/0245431 and WO 2006/135866.

[0125] There are three open reading frames that form the core Schizochytrium PUFA synthase system and that have been described previously, e.g., in U.S. Appl. Pub. No. 2007/0245431. The domain structure of each open reading frame is as follows.

[0126] Schizochytrium Open Reading Frame A (OrfA or Pfa1):

[0127] OrfA is a 8730 nucleotide sequence (not including the stop codon) which encodes a 2910 amino acid sequence. Within OrfA are twelve domains (a) one β-keto acyl-ACP synthase (KS) domain; (b) one malonyl-CoA:ACP acyltransferase (MAT) domain; (c) nine acyl carrier protein (ACP) domains; and (d) one ketoreductase (KR) domain. Genomic DNA clones (plasmids) encoding OrfA from both Schizochytrium sp. ATCC 20888 and a daughter strain of ATCC 20888, denoted Schizochytrium sp., strain N230D, have been isolated and sequenced.

[0128] Genomic clone pJK1126 (denoted pJK1126 OrfA genomic clone, in the form of an E. coli plasmid vector containing “OrfA” gene from Schizochytrium ATCC 20888) was deposited with the American Type Culture Collection (ATCC), 10801 University Boulevard, Manassas, Va. 20110-2209 USA on Jun. 8, 2006, and assigned ATCC Accession No. PTA-7648.

[0129] Genomic clone pJK306 (denoted pJK306 OrfA genomic clone, in the form of an E. coli plasmid containing 5′ portion of OrfA gene from Schizochytrium sp. N230D (2.2 kB overlap with pJK320)) was deposited with the American Type Culture Collection (ATCC), 10801 University Boulevard, Manassas, Va. 20110-2209 USA on Jun. 8, 2006, and assigned ATCC Accession No. PTA-7641.

[0130] Genomic clone pJK320 (denoted pJK320 OrfA genomic clone, in the form of an E. coli plasmid containing 3′ portion of OrfA gene from Schizochytrium sp. N230D (2.2 kB overlap with pJK306)) was deposited with the American Type Culture Collection (ATCC), 10801 University Boulevard, Manassas, Va. 20110-2209 USA on Jun. 8, 2006, and assigned ATCC Accession No. PTA-7644.

[0131] Schizochytrium Open Reading Frame B (OrfB or Pfa2):

[0132] OrfB is a 6177 nucleotide sequence (not including the stop codon) which encodes a 2059 amino acid sequence. Within OrfB are four domains: (a) one-keto acyl-ACP synthase (KS) domain; (b) one chain length factor (CLF) domain; (c) one acyl transferase (AT) domain; and, (d) one enoyl ACP-reductase (ER) domain. Genomic DNA clones (plasmids) encoding OrfB from both Schizochytrium sp. ATCC 20888 and a daughter strain of ATCC 20888, denoted Schizochytrium sp., strain N230D, have been isolated and sequenced.

[0133] Genomic clone pJK1129 (denoted pJK1129 OrfB genomic clone, in the form of an E. coli plasmid vector containing “OrfB” gene from Schizochytrium ATCC 20888) was deposited with the American Type Culture Collection (ATCC), 10801 University Boulevard, Manassas, Va. 20110-2209 USA on Jun. 8, 2006, and assigned ATCC Accession. No. PTA-7649.

[0134] Genomic clone pJK324 (denoted pJK324 OrfB genomic clone, in the form of an E. coli plasmid containing the OrfB gene sequence from Schizochytrium sp. N230D) was deposited with the American Type Culture Collection (ATCC), 10801 University Boulevard, Manassas, Va. 20110-2209 USA on Jun. 8, 2006, and assigned ATCC Accession No. PTA-7643.

[0135] Schizochytrium Open Reading Frame C (OrfC or Pfa3):

[0136] OrfC is a 4506 nucleotide sequence (not including the stop codon) which encodes a 1502 amino acid sequence. Within OrfC are three domains: (a) two FabA-like-hydroxy acyl-ACP dehydrase (DH) domains; and (b) one enoyl ACP-reductase (ER) domain. Genomic DNA clones (plasmids) encoding OrfC from both Schizochytrium sp. ATCC 20888 and a daughter strain of ATCC 20888, denoted Schizochytrium sp., strain N230D, have been isolated and sequenced.

[0137] Genomic clone pJK1131 (denoted pJK1131 OrfC genomic clone, in the form of an E. coli plasmid vector containing “OrfC” gene from Schizochytrium ATCC 20888) was deposited with the American Type Culture Collection (ATCC), 10801 University Boulevard, Manassas, Va. 20110-2209 USA on Jun. 8, 2006, and assigned ATCC Accession No. PTA-7650.

[0138] Genomic clone pBR002 (denoted pBR002 OrfC genomic clone, in the form of an E. coli plasmid vector containing the OrfC gene sequence from Schizochytrium sp. N230D) was deposited with the American Type Culture Collection (ATCC), 10801 University Boulevard, Manassas, Va. 20110-2209 USA on Jun. 8, 2006, and assigned ATCC Accession No. PTA-7642.

[0139] In addition, there are three open reading frames that form the core Thraustochytrium PUFA synthase that have been described previously. The domain structure of each open reading frame is as follows.

[0140] Thraustochrium 23B Open Reading Frame A (OrfA):

[0141] OrfA is a 8433 nucleotide sequence (not including the stop codon) which encodes a 2811 amino acid sequence. The following domains are present in Th. 23B OrfA (a) one β-ketoacyl-ACP synthase (KS) domain; (b) one malonyl-CoA:ACP acyltransferase (MAT) domain; (c) eight acyl carrier protein (ACP) domains; and (d) one β-ketoacyl-ACP reductase (KR) domain.

[0142] Genomic clone Th23BOrfA_pBR812.1 (denoted Th23BOrfA_pBR812.1 genomic clone, in the form of an E. coli plasmid vector containing the OrfA gene sequence from Thraustochytrium 23B) was deposited with the American Type Culture Collection (ATCC), University Boulevard, Manassas, Va. 20110-2209 USA on Mar. 1, 2007, and assigned ATCC Accession No. PTA-8232. Genomic clone Th23BOrfA_pBR811 (denoted Th23BOrfA_pBR811 genomic clone, in the form of an E. coli plasmid vector containing the OrfA gene sequence from Thraustochytrium 23B) was deposited with the American Type Culture Collection (ATCC), 10801 University Boulevard, Manassas, Va. 20110-2209 USA on Mar. 1, 2007, and assigned ATCC Accession No. PTA-8231.

[0143] Thraustochytrium 23B Open Reading Frame B (OrfB):

[0144] OrfB is a 5805 nucleotide sequence (not including the stop codon) that encodes a 1935 amino acid sequence. The following domains are present in Th. 23B OrfB (a) one β-ketoacyl-ACP synthase (KS) domain; (b) one chain length factor (CLF) domain; (c) one acyltransferase (AT) domain; and, (d) one enoyl-ACP reductase (ER) domain. Genomic clone Th23BOrfB_pBR800 (denoted Th23BOrfB_pBR800 genomic clone, in the form of an E. coli plasmid vector containing the OrfB gene sequence from Thraustochytrium 23B) was deposited with the American Type Culture Collection (ATCC), 10801 University Boulevard, Manassas, Va. 20110-2209 USA on Mar. 1, 2007, and assigned ATCC Accession No, PTA-8227.

[0145] Thraustochytrium 23B Open Reading Frame C (OrfC):

[0146] OrfC is a 4410 nucleotide sequence (not including the stop codon) that encodes a 1470 amino acid sequence. The following domains are present in Th. 23B OrfC: (a) two FabA-like β-hydroxyacyl-ACP dehydrase (DH) domains, both with homology to the FabA protein (an enzyme that catalyzes the synthesis of trans-2-decenoyl-ACP and the reversible isomerization of this product to cis-3-decenoyl-ACP); and (b) one enoyl-ACP reductase (ER) domain with high homology to the ER domain of Schizochytrium OrfB. Genomic clone Th23BOrfC_OR709A (denoted Th23BOrfC_pBR709A genomic clone, in the form of an E. coli plasmid vector containing the OrfC gene sequence from Thraustochytrium 23B) was deposited with the American Type Culture Collection (ATCC), 10801 University Boulevard, Manassas, Va. 20110-2209 USA on Mar. 1, 2007, and assigned ATCC Accession No. PTA-8228.

[0147] Chimeric or Hybrid PUFA Synthase Systems:

[0148] In some embodiments, the PUFA synthase system comprises domains selected from any of those described herein, wherein the domains are combined (e.g., mixed and matched) to form a complete PUFA synthase system meeting the minimum requirements described herein. In some embodiments, the genetically modified organism of the invention can be further modified with at least one domain or biologically active fragment thereof of another PUFA synthase system. In some embodiments, any of the domains of a PUFA synthase system can be modified from their natural structure to modify or enhance the function of that domain in the PUFA synthase system (e.g., to modify the PUFA types or ratios thereof produced by the system). Such mixing of domains to produce chimeric PUFA synthase systems is described in the patents and publications referenced herein.

[0149] In some embodiments, the PUFA synthase system comprises a Schizochytrium PUFA synthase system wherein OrfC from the Schizochytrium PUFA synthase system is replaced with OrfC from Thraustochytrium 23B. In some embodiments, such a chimeric OrfC from Thraustochytrium 23B is encoded by a nucleic acid sequence that is optimized for Schizochytrium codon usage. As a non-limiting example of such a chimeric OrfC, plasmid pThOrfC-synPS (denoted pThOrfC-synPS, in the form of an E. coli plasmid vector containing a “perfect stitch” synthetic Thraustochytrium 23B PUFA PKS OrfC codon optimized for expression in Schizochytrium or other heterologous hosts) was deposited with the American Type Culture Collection (ATCC), 10801 University Boulevard, Manassas, Va. 20110-2209 USA on Mar. 1, 2007, and assigned ATCC Accession No. PTA-8229 (see also U.S. Appl. Pub. No. 2008/0022422).

[0150] Other examples of PUFA synthase genes and polypeptides that can be used in a genetically modified organism of the invention include, but are not limited to, the following codon-optimized sequences generated by the methods described further herein: SEQ ID NO:1 (SzPUFA OrfA v3 protein); SEQ ID NO:2 (SzPUFA OrfB v3 protein); SEQ ID NO:3 (hSzThPUFA OrfC v3 protein); SEQ ID NO:6 (SzPUFA OrfA gene); SEQ ID NO:7 (SzPUFA OrfB v3 gene); and SEQ ID NO:8 (hSzThPUFA OrfC v3 gene), as well as an active variant, portion, fragment, or derivative of such sequences, wherein such a gene encodes, or such a polypeptide or protein has, PUFA synthase activity. The present invention includes an isolated polynucleotide or polypeptide comprising or consisting of one or more of such sequences.

[0151] Other examples of PUFA synthase genes and polypeptides that can be used in a genetically modified organism of the invention include, but are not limited to, PUFA synthase genes or polypeptides having 60%, 65%, 70%, 75%, 80%, 85%, 90%, 95%, 96%, 97%, 98%, 99% or 100% sequence identity to any one of the PUFA synthases or sequences described herein. Useful ranges can be selected between any of these values (for example, 60% to 99%, 65% to 95%, 70% to 95%, 75% to 95%, 80% to 95%, 85% to 95%, or 90% to 99%). Still other examples of PUFA synthase genes and polypeptides that can used in a genetically modified organism of the invention include, but are not limited to an active variant, portion, fragment of derivative of any one of the PUFA synthases or sequences described herein, wherein such a gene encodes, or such a polypeptide has, PUFA synthase activity.

[0152] In some embodiments, the PUFA synthase system can be an algal PUFA synthase. In some embodiments, the PUFA synthase system can comprise an amino acid sequence that is at least 60% to 99% identical to the amino acid sequence of SEQ ID NO:1. In some embodiments, the PUFA synthase system can comprise the amino acid sequence of SEQ ID NO:1. In some embodiments, the nucleic acid sequence encoding the PUFA synthase system can comprise a nucleic acid sequence at least 60% to 99% identical to the nucleic acid sequence of SEQ ID NO:6. In some embodiments, the nucleic acid sequence encoding the PUFA synthase system can comprise the nucleic acid sequence of SEQ ID NO:6. In some embodiments, the PUFA synthase system can comprise an amino acid sequence that is at least 80% identical to the amino acid sequence of SEQ ID NO:2. In some embodiments, the PUPA synthase system can comprise the amino acid sequence of SEQ ID NO:2. In some embodiments, the nucleic acid sequence encoding the PUFA synthase system can comprise a nucleic acid sequence that is at least 80% identical to the nucleic acid sequence of SEQ ID NO:7. In some embodiments, the nucleic acid sequence encoding the PUPA synthase system can comprise the nucleic acid sequence of SEQ ID NO:7. In some embodiments, the PUPA synthase system can comprise an amino acid sequence that is at least 80% identical to the amino acid sequence of SEQ ID NO:3. In some embodiments, the PUFA synthase system comprises the amino acid sequence of SEQ ID NO:3. In some embodiments, the nucleic acid sequence encoding the PUPA synthase system comprises a nucleic acid sequence that is at least 80% identical to the nucleic acid sequence of SEQ ID NO:8. In some embodiments, the nucleic acid sequence encoding the PUFA synthase system comprises the nucleic acid sequence of SEQ ID NO:8.

[0153] In some embodiments, the PUPA synthase system comprises the amino acid sequence of SEQ ID NO:1, 2, or 3 or any combinations thereof. In some embodiments, the PUFA synthase system comprises the nucleic acid sequence of SEQ ID NO:6, 7, or 8 or any combinations thereof.

[0154] In some embodiments, the sequences of other PUPA synthase genes and/or polypeptides can be identified in the literature and in bioinformatics databases well known to the skilled person using sequences disclosed herein and available in the art. For example, such sequences can be identified through BLAST searching of publicly available databases with known PUPA synthase gene or polypeptide sequences. In such a method, identities can be based on the Clustal W method of alignment using the default parameters of GAP PENALTY=10, GAP LENGTH PENALTY=0.1, and Gonnet 2.50 series of protein weight matrix.

[0155] Additionally, the PUPA synthase gene or polypeptide sequences disclosed herein or known the art can be used to identify other PUFA synthase homologs in nature. For example, each of the PUPA synthase nucleic acid fragments disclosed herein can be used to isolate genes encoding homologous proteins. Isolation of homologous genes using sequence-dependent protocols is well known in the art. Examples of sequence-dependent protocols include, but are not limited to (1) methods of nucleic acid hybridization; (2) methods of DNA and RNA amplification, as exemplified by various uses of nucleic acid amplification technologies [e.g., polymerase chain reaction (PCR), Mullis et al., U.S. Pat. No. 4,683,202; ligase chain reaction (LCR), Tabor, S. et al., Proc. Acad. Sci. USA 82:1074 (1985); or strand displacement amplification (SDA), Walker et al., Proc. Natl. Acad. Sci. U.S.A., 89:392 (1992)]; and (3) methods of library construction and screening by complementation.

[0156] All of these methods can be readily practiced by one skilled in the art making use of the known or identified sequences encoding target proteins. In some embodiments, DNA sequences surrounding a target PUFA synthase coding sequence are also useful in some modification procedures and can be readily found by one of skill in the art in publicly available databases. Methods for creating genetic mutations are common and well known in the art and can be applied to the exercise of creating mutants.

### Phosphopantethienyl Transferase

[0157] The phosphopantethienyl transferases (PPTases) are a family of enzymes that have been well characterized in fatty acid synthesis, polyketide synthesis, and non-ribosomal peptide synthesis. In particular, the ACP domains present in the PUFA synthase enzymes require activation by attachment of a cofactor (4-phosphopantetheine) from coenzyme A to the acyl carrier protein (ACP). Attachment of this cofactor is carried out by PPTases. If the endogenous PPTases of the host organism are incapable of activating the PUFA synthase ACP domains, then it is necessary to provide a PPTase that is capable of carrying out that function. The sequences of many PPTases are known, and crystal structures have been determined (e.g., Reuter et al., EMBO J. 18:6823-31 (1999)) as well as mutational analysis of amino acid residues important for activity (Mofid et al., Biochemistry 43:4128-36 (2004)).

[0158] One example of a heterologous PPTase which has been demonstrated previously to recognize the OrfA ACP domains described herein as substrates is the Het I protein of Nostoc sp. PCC 7120 (formerly called Anabaena sp. PCC 7120). Het I is present in a cluster of genes in Nostoc known to be responsible for the synthesis of long chain hydroxy-fatty acids that are a component of a glyco-lipid layer present in heterocysts of that organism (Black and Wolk, J. Bacteriol. 176:2282-2292 (1994); Campbell et al., Arch. Microbiol. 167:251-258 (1997)). Het I is likely to activate the ACP domains of a protein, Hgl E, present in that cluster. The two ACP domains of Hgl E have a high degree of sequence homology to the ACP domains found in Schizochytrium Orf A and other PUFA synthases.

[0159] In some embodiments, a PUFA synthase can be considered to include at least one 4′-phosphopantetheinyl transferase (PPTase) domain, or such a domain can be considered to be an accessory domain or protein to the PUFA synthase. Structural and functional characteristics of PPTases have been described in detail, for example, in U.S. Appl. Pub. No. 2002/0194641; U.S. Appl. Pub. No. 2004/0235127; and U.S. Appl. Pub. No. 2005/0100995.

[0160] Numerous examples of genes and polypeptides having PPTase activity are known in the art and could be used in a genetically modified organism of the invention if they are capable of activating the ACP domains of the particular PUFA synthase being used. Examples of genes and polypeptides that can be used in a genetically modified organism of the invention can include, but are not limited to, the following codon-optimized sequences described further herein: SEQ ID NO:5 (NoHetI v3 protein) and SEQ ID NO:10 (NoHetI v3 gene).

[0161] Other examples of PPTase genes and polypeptides that can be used in a genetically modified organism of the invention include, but are not limited to, PPTase genes or polypeptides having 60%, 65%, 70%, 75%, 80%, 85%, 90%, 95%, 96%, 97%, 98%, 99% or 100% sequence identity to any one of the PPTases or sequences described herein. Useful ranges can be selected between any of these values (for example, 60% to 99%, 65% to 95%, 70% to 95%, 75% to 95%, 80% to 95%, 85% to 95%, 90% to 99%). Still other examples of PPTase genes and polypeptides that can used in a genetically modified organism of the invention include, but are not limited to an active variant, fragment, portion or derivative of any one of the PPTase sequences described herein, wherein such a gene encodes, or such a polypeptide has, PPTase activity.

[0162] In some embodiments, the PPTase can be an algal PPTase. In some embodiments, the PPTase can comprise an amino acid sequence that is at least 60% to 99% identical to the amino acid sequence of SEQ ID NO:5. In some embodiments, the PPTase can comprise the amino acid sequence of SEQ ID NO:5. In some embodiments, the nucleic acid sequence encoding the algal PPTase can comprise a nucleic acid sequence at least 60% to 99% identical to the nucleic acid sequence of SEQ ID NO:10. In some embodiments, the nucleic acid sequence encoding the algal PPTase can comprise the nucleic acid sequence of SEQ ID NO:10.

[0163] In some embodiments of the present invention, a PPTase can be provided for production and/or accumulation of PPTase in a heterologous host.

[0164] In some embodiments, a gene and/or polypeptide encoding PPTase can be used to identify another PPTase gene and/or polypeptide sequences and/or can be used to identify a PPTase homolog in other cells. Such PPTase encoding sequences can be identified, for example, in the literature and/or in bioinformatics databases well known to the skilled person. For example, the identification of a PPTase encoding sequence in another cell type using bioinformatics can be accomplished through BLAST (as disclosed above) searching of publicly available databases with a known PPTase encoding DNA and polypeptide sequence, such as any of those provided herein. Identities are based on the Clustal W method of alignment using the default parameters of GAP PENALTY=10, GAP LENGTH PENALTY=0.1, and Gonnet 250 series of protein weight matrix.

[0165] In some embodiments, the genetically modified plant (e.g., Brassica), descendant, cell, tissue, or part thereof contains the nucleic acid sequences of (i) and (ii) in a single recombinant expression vector.

### Acyl-CoA Synthetase

[0166] The present invention provides acyl-CoA synthetase (ACoAS) proteins that catalyze the conversion of long chain PUFA free fatty acids (FFA) to acyl-CoA. The endogenous producer of PUFAs by PUFA synthase, Schizochytrium, possesses one or more ACoASs that are capable of converting the free fatty acid products of its PUFA synthase into acyl-CoA. This is evident by the fact that high levels of PUFAs accumulate in those fractions in this organism. Therefore, Schizochytrium, as well as other organisms that endogenously contain a PUFA synthase (e.g., other Thraustochytrids) or other organisms that can convert PUFA FFAs into acyl-COAs (such as Thalassiosira pseudonana or Crypthecodinium cohnii), could represent sources for genes encoding enzymes that are useful in permitting or increasing the accumulation of the products of a PUFA synthase expressed in a heterologous host. Other ACoAS sequences have been described in U.S. Appl. Pub. No, 2007/0245431.

[0167] Numerous examples of genes and polypeptides having ACoAS activity are known in the art and can be used in a genetically modified organism of the invention. Examples of genes and polypeptides that can be used in a genetically modified organism of the invention can include, but are not limited to, the following codon-optimized sequences described further herein: SEQ ID NO:4 (SzACS-2 v3 protein) and SEQ ID NO:9 (hSzThACS-2 v3 gene).

[0168] Other examples of ACoAS genes and polypeptides that can be used in a genetically modified organism of the invention include, but are not limited to, ACoAS genes or polypeptides having 60%, 65%, 70%, 75%, 80%, 85%, 90%, 95%, 96%, 97%, 98%, 99% or 100% sequence identity to any one of the ACoAS or sequences described herein. Useful ranges can be selected between any of these values (for example, 60% to 99%, 65% to 95%, 70% to 95%, 75% to 95%, 80% to 95%, 85% to 95%, 90% to 99%). Still other examples of ACoAS genes and polypeptides that can used in a genetically modified organism of the invention include, but are not limited to an active variant, fragment, portion, or derivative of any one of the ACoAS sequences described herein, wherein such a gene encodes, or such a polypeptide has, ACoAS activity.

[0169] In some embodiments, the ACoAS can be an algal ACoAS. In some embodiments, the ACoAS can comprise an amino acid sequence that is at least 60% to 99% identical to the amino acid sequence of SEQ ID NO:4. In some embodiments, the ACoAS can comprise the amino acid sequence of SEQ ID NO:4. In some embodiments, the nucleic acid sequence encoding the algal ACoAS can comprise a nucleic acid sequence at least 60% to 99% identical to the nucleic acid sequence of SEQ ID NO:9. In some embodiments, the nucleic acid sequence encoding the algal ACoAS can comprise the nucleic acid sequence of SEQ ID NO:9. In some embodiments, the nucleic acid sequence encoding the ACoAS comprises the nucleic acid sequence of SEQ ID NO:34.

[0170] In some embodiments of the present invention, ACoAS can be provided for production and/or accumulation of ACoAS in a heterologous host as well as for improved production and/or accumulation of ACoAS in an endogenous host.

[0171] In some embodiments, a gene and/or polypeptide encoding ACoAS can be used to identify another ACoAS gene and/or polypeptide sequences and/or can be used to identify an ACoAS homolog in other cells. Such ACoAS encoding sequences can be identified, for example, in the literature and/or in bioinformatics databases well known to the skilled person. For example, the identification of a ACoAS encoding sequence in another cell type using bioinformatics can be accomplished through BLAST (as disclosed above) searching of publicly available databases with a known ACoAS encoding DNA and polypeptide sequence, such as any of those provided herein. Identities are based on the Clustal W method of alignment using the default parameters of GAP PENALTY=10, GAP LENGTH PENALTY=0.1, and Gonnet 250 series of protein weight matrix.

[0172] In some embodiments, the genetically modified plant (e.g., Brassica), descendant, cell, tissue, or part thereof comprises the nucleic acid sequences of (i), (ii) or (iii), or any combinations thereof, contained in a single recombinant expression vector. In some embodiments, the nucleic acid sequences of (i), (ii) or (iii), or any combinations thereof, are under the control of one or more seed-specific promoters and/or are contained in a single recombinant expression vector.

### Methods of Making Genetically Modified Organisms

[0173] To produce significantly high yields of one or more desired polyunsaturated fatty acids, an organism (e.g., a plant), can be genetically modified to introduce a PUFA synthase into the plant. The present invention also relates to methods to improve or enhance the effectiveness of such genetic modification and particularly, to improve or enhance the production and/or accumulation of the endproduct of a PUFA synthase, e.g., PUFA(s).

[0174] Methods for gene expression in a genetically modified organism, including, but not limited to plants, are known in the art. In some embodiments, the coding region for the PUFA synthase genes to be expressed can be codon optimized for the target host cell as described below. Expression of genes in recombinant host cells, including but not limited to plant cells, can require a promoter operably linked to a coding region of interest, and/or a transcriptional terminator. A number of promoters can be used in constructing vectors for genes, including but not limited to a seed-specific promoter (e.g., PvDlec2, LfKCS3 and FAE 1). Other non-limiting examples of promoters that can be used in the present invention include the acyl carrier protein promoter disclosed in WO 1992/18634; the Phaseolus vulgaris beta-phaseolin promoter and truncated versions disclosed in Slightom et al. (Proc. Natl. Acad. Sci. U.S.A. 80:1897-1901; 1983); Sengupta-Gopalan et al. (Proc. Nat. Acad. Sci. 82:3320-3324; 1985); van der Geest et al. (Plant Mol. Biol. 33:553-557; 1997), and Bustos et al. (EMBO J. 10:1469-1479; 1991).

[0175] In some embodiments of the present invention, a recombinant vector is an engineered (e.g., artificially produced) nucleic acid molecule that is used as a tool for manipulating a nucleic acid sequence of choice and for introducing such a nucleic acid sequence into a host cell. The recombinant vector is therefore suitable for use in cloning, sequencing, and/or otherwise manipulating the nucleic acid sequence of choice, such as by expressing and/or delivering the nucleic acid sequence of choice into a host cell to form a recombinant cell. Such a vector typically contains heterologous nucleic acid sequences, that is nucleic acid sequences that are not naturally found adjacent to nucleic acid sequence to be cloned or delivered, although the vector can also contain regulatory nucleic acid sequences (e.g., promoters, untranslated regions) which are naturally found adjacent to nucleic acid molecules of the present invention or which are useful for expression of the nucleic acid molecules of the present invention. The vector can be either RNA or DNA, either prokaryotic or eukaryotic, and typically is a plasmid. The vector can be maintained as an extrachromosomal element (e.g., a plasmid) or it can be integrated into the chromosome of a recombinant organism (e.g., a microbe or a plant). The entire vector can remain in place within a host cell, or under certain conditions, the plasmid DNA can be deleted, leaving behind the nucleic acid molecule of the present invention. The integrated nucleic acid molecule can be under chromosomal promoter control, under native or plasmid promoter control, or under a combination of several promoter controls. Single or multiple copies of the nucleic acid molecule can be integrated into the chromosome. A recombinant vector of the present invention can contain at least one selectable marker.

[0176] In some embodiments, a recombinant vector used in a recombinant nucleic acid molecule of the present invention is an expression vector. In such an embodiment, a nucleic acid sequence encoding the product to be produced (e.g., a PUFA synthase) is inserted into the recombinant vector to produce a recombinant nucleic acid molecule. The nucleic acid sequence encoding the protein to be produced is inserted into the vector in a manner that operatively links the nucleic acid sequence to regulatory sequences in the vector that enable the transcription and translation of the nucleic acid sequence within the recombinant host cell.

[0177] Vectors useful for the transformation of a variety of host organisms and cells are common and disclosed in the literature. Typically the vector contains a selectable marker and sequences allowing autonomous replication or chromosomal integration in the desired host. In addition, suitable vectors can comprise a promoter region which harbors transcriptional initiation controls and a transcriptional termination control region, between which a coding region DNA fragment can be inserted, to provide expression of the inserted coding region. Both control regions can be derived from genes homologous to the transformed host cell, although it is to be understood that such control regions can also be derived from genes that are not native to the specific species chosen as a production host.

[0178] The present invention includes the expression of one or more acyl-CoA synthetases as described and exemplified herein with a PUFA synthase as described herein and with an exogenous PPTase which are utilized alone or in combination with any one or more strategies described herein (e.g., any one, two, three, or four of: codon optimization, organelle-targeting, enhancement of PUFA synthase competition for malonyl CoA (e.g., by inhibition of FAS), and/or expression of one or more acyltransferases or related enzymes), to increase PUFA production and/or accumulation in a heterologous host.

[0179] Some embodiments of the invention relate to the targeting of expression of the PUFA synthase enzymes, the PPTase, and/or any one or more of the accessory proteins and/or targeted genetic modifications to one or more organelles of the host. For example, in some embodiments, expression of the PUFA synthase system and the PPTase can be targeted to the plastid of a plant. In some embodiments, expression of the PUFA synthase and the PPTase is targeted to the cytosol. In some embodiments, expression of the PUFA synthase and the PPTase is targeted to both the plastid and the cytosol of a plant. In any of these embodiments, other targets can be directed to the plastid or the cytosol.

[0180] In some embodiments, acyl-CoA synthetases are expressed in the cytosol to convert the DHA and/or other LC-PUFA free fatty acids to acyl-CoAs, which in turn can be utilized by the acyltransferases.

[0181] One exemplary plastid targeting sequence is derived from a Brassica napus acyl-ACP thioesterase and is described in U.S. Appl. Pub. No. 2007/0245431. A variety of other plastid targeting sequences are known in the art and can be used in embodiments where the heterologous host is a plant or plant cell, and wherein targeting to the plastid is desired.

[0182] The present invention includes the use of organelle targeting (e.g., to the plastid or chloroplast in plants) with expression of a PUFA synthase as described herein and with an exogenous PPTase, which are utilized alone or in combination with any one or more strategies described herein (e.g., any one, two, three, or four of: codon optimization, enhancement of PUFA synthase competition for malonyl CoA (e.g., by inhibition of FAS), expression of one or more acyl-CoA synthetases, and/or expression of one or more acyltransferases or related enzymes), to increase PUFA production and/or accumulation in a heterologous host.

[0183] The targeting of gene products to the plastid or chloroplast is controlled by a signal sequence found at the amino terminal end of various proteins and which is cleaved during import yielding the mature protein (e.g., with regard to chloroplast targeting, see, e.g., Comai et al., J. Biol. Chem. 263:15104-15109 (1988)). These signal sequences can be fused to heterologous gene products to effect the import of heterologous products into the chloroplast (van den Broeck et al. Nature 313:358-363 (1985)). DNA encoding for appropriate signal sequences can be isolated from the cDNAs encoding the RUBISCO protein, the CAB protein, the EPSP synthase enzyme, the GS2 protein and many other proteins which are known to be chloroplast localized.

[0184] In some embodiments of the invention, the localization of proteins employed in the invention is directed to a subcellular compartment, for example, to the plastid or chloroplast. Proteins can be directed to the chloroplast by including at their amino-terminus a chloroplast transit peptide (CTP). Similarly, proteins can be directed to the plastid by including at their N-terminus a plastid transit or signaling peptide.

[0185] Naturally occurring chloroplast targeted proteins, synthesized as larger precursor proteins containing an amino-terminal chloroplast targeting peptide directing the precursor to the chloroplast import machinery, are well known in the art. Chloroplast targeting peptides are generally cleaved by specific endoproteases located within the chloroplast organelle, thus releasing the targeted mature and preferably active enzyme from the precursor into the chloroplast milieu. Examples of sequences encoding peptides which are suitable for directing the targeting of the gene or gene product to the chloroplast or plastid of the plant cell include the petunia EPSPS CTP, the Arabidopsis EPSPS CTP2 and intron, and others known to those skilled in the art. Such targeting sequences provide for the desired expressed protein to be transferred to the cell structure in which it most effectively functions, or by transferring the desired expressed protein to areas of the cell in which cellular processes necessary for desired phenotypic function are concentrated. Specific examples of chloroplast targeting peptides are well known in the art and include the Arabidopsis thaliana ribulose bisphosphate carboxylase small subunit ats1A transit peptide, an Arabidopsis thaliana EPSPS transit peptide, and a Zea maize ribulose bisphosphate carboxylase small subunit transit peptide.

[0186] An optimized transit peptide is described, for example, by van den Broeck et al., Nature, 313:358-363 (1985). Prokaryotic and eukaryotic signal sequences are disclosed, for example, by Michaelis et al., Ann. Rev. Microbiol. 36:425 (1982). Additional examples of transit peptides that can be used in the invention include the chloroplast transit peptides such as those described in Von Heijne et al., Plant Mol. Biol. Rep. 9:104-126 (1991); Mazur et al., Plant Physiol. 85:1110 (1987); Vorst et al., Gene 65:59 (1988). Chen & Jagendorf (J. Biol. Chem. 268:2363-2367 (1993)) have described use of a chloroplast transit peptide for import of a heterologous transgene. This peptide used is the transit peptide from the rbcS gene from Nicotiana plumbaginifolia (Poulsen et al. Mol. Gen. Genet. 205: 193-200 (1986)). One CTP that has functioned herein to localize heterologous proteins to the chloroplast was derived from Brassica napus acyl-ACP thioesterase.

[0187] An alternative means for localizing genes to chloroplast or plastid includes chloroplast or plastid transformation. Recombinant plants can be produced in which only the chloroplast DNA has been altered to incorporate the molecules envisioned in this application. Promoters which function in chloroplasts are known in the art (Hanley-Bowden et al., Trends in Biochemical Sciences 12:67-70 (1987)). Methods and compositions for obtaining cells containing chloroplasts into which heterologous DNA has been inserted have been described, for example by Daniell et al. (U.S. Pat. No. 5,693,507) and Maliga et al. (U.S. Pat. No. 5,451,513).

### Combinations of Strategies

[0188] According to the present invention, in the production of a heterologous host for the production and accumulation of one or more target PUFAs, any one or more (any combination) of the strategies described herein for improving the production and/or accumulation of PUFAs in the host can be used. Indeed, it is anticipated that various combinations of strategies will be additive or synergistic and provide improved production and/or accumulation of PUFAs as compared to in the absence of one or more such strategies. Indeed, the Examples provide exemplary strategies for the production of PUFAs in a host organism.

[0189] Any plant or plant cell using these combinations of modifications, or any other modification or combination of modifications described herein, is encompassed by the invention. In some embodiments, such a plant has been further genetically modified to express an accessory protein as described herein for the improvement of the production and/or accumulation of PUFAs (or other bioactive products of the PUFA synthase) by the host (e.g., ACoAS, GPAT, LPAAT, DAGAT or acetyl CoA carboxylase (ACCase)). Furthermore, any host cell or organism using any modifications or combination of modifications described herein is encompassed by the invention, as are any products derived from such cell or organisms, including seed or oil comprising the target PUFAs.

[0190] In some embodiments, plants to genetically modify according to the present invention (e.g., plant host cells) includes, but is not limited to any higher plants, including both dicotyledonous and monocotyledonous plants, and particularly consumable plants, including crop plants and especially plants used for their oils. Such plants can include, but are not limited to, for example: canola, soybeans, rapeseed, linseed, corn, safflowers, sunflowers and tobacco. Thus, any plant species or plant cell can be selected. In embodiments, plant cells used herein, and plants grown or derived therefrom, include, but are not limited to, cells obtainable from canola (Brassica napus); oilseed rape (Brassica napus); indian mustard (Brassica juncea); Ethiopian mustard (Brassica carinata); turnip (Brassica rapa); cabbage (Brassica oleracea); soybean (Glycine max); linseed/flax (Linum usitatissimum); maize (corn) (Zea mays); safflower (Carthamus tinctorius); sunflower (Helianthus annuus); tobacco (Nicotiana tabacum); Arabidopsis thaliana, Brazil nut (Betholettia excelsa); castor bean (Ricinus communis); coconut (Cocus nucifera); coriander (Coriandrum sativum); cotton (Gossypium spp.); groundnut (Arachis hypogaea); jojoba (Simmondsia chinensis); oil palm (Elaeis guineeis); olive (Olea eurpaea); rice (Oryza sativa); squash (Cucurbita maxima); barley (Hordeum vulgare); wheat (Triticum aestivum); and duckweed (Lemnaceae sp.). In some embodiments, the genetic background within a plant species can vary.

[0191] “Plant parts,” as used herein, include any parts of a plant, including, but not limited to, seeds (including mature seeds and immature seeds), pollen, embryos, flowers, fruits, shoots, leaves, roots, stems, explants, etc. In some embodiments, a genetically modified plant has a genome which is modified (e.g., mutated or changed) from its normal (e.g., wild-type or naturally occurring) form such that the desired result is achieved (e.g., increased or modified PUFA synthase and/or production and/or accumulation of a desired product using the PUFA synthase). In some embodiments, genetic modification of a plant can be accomplished using classical strain development and/or molecular genetic techniques. Methods for producing a transgenic plant, wherein a recombinant nucleic acid molecule encoding a desired amino acid sequence is incorporated into the genome of the plant, are known in the art. In some embodiments, a plant to genetically modify according to the present invention is a plant suitable for consumption by animals, including humans.

[0192] Plant lines from these plants, optimized for a particularly desirable trait, e.g. disease resistance, ease of plant transformation, oil content or profile, etc., can be produced, selected or identified. In some embodiments, plant lines can be selected through plant breeding, or through methods such as marker assisted breeding and tilling. In some embodiments, plant cell cultures can be used and, for example, are not grown into differentiated plants and cultivated using ordinary agricultural practices, but instead grown and maintained in a liquid medium.

[0193] In some embodiments, the plant can be an oil seed plant, wherein the oil seeds, and/or the oil in the oil seeds contain PUFAs produced by the PUFA synthase. In some embodiments, such oils can contain a detectable amount of at least one target or primary PUFA that is the product of the PUFA synthase. In some embodiments, such oils can be substantially free of intermediate or side products that are not the target or primary PUFA products and that are not naturally produced by the endogenous FAS system in the wild-type plants (e.g., wild-type plants produce some shorter or medium chain PUFAs, such as 18 carbon PUFAs, via the FAS system, but there will be new, or additional, fatty acids produced in the plant as a result of genetic modification with a PUFA synthase system).

[0194] With regard to the production of genetically modified plants, methods for the genetic engineering of plants are well known in the art. For instance, numerous methods for plant transformation have been developed, including biological and physical transformation protocols for dicotyledenous plants as well as monocotyledenous plants (e.g., Goto-Runiyuki et al., Nature Biotech 17:282-286 (1999); Miki et al. Methods in Plant Molecular Biology and Biotechnology, Glick, B. R. and Thompson, J. E. Eds., CRC Press, Inc., Boca Raton, pp. 67-88 (1993). In addition, vectors and in vitro culture methods for plant cell or tissue transformation and regeneration of plants are available, for example, in Gruber et al., Methods in Plant Molecular Biology and Biotechnology, Glick, B. R. and Thompson, J. E. Eds., CRC Press, Inc., Boca Raton, pp. 89-119 (1993).

[0195] The present invention is drawn to an isolated nucleic acid molecule comprising a nucleic acid sequence selected from SEQ ID NOs: 6-10 as well as an isolated nucleic acid molecule comprising a modification or mutation of such a sequence as described herein. The present invention is drawn to isolated polypeptides comprising an amino acid sequence selected from SEQ ID NOs: 1-5 as well as an isolated polypeptide comprising a modification or mutation or such a sequence as described herein.

[0196] The present invention includes a recombinant expression vector pDAB7361. The present invention includes a recombinant expression vector pDAB7362. The present invention includes a recombinant expression vector pDAB7363. The present invention includes a recombinant expression vector pDAB7365. The present invention includes a recombinant expression vector pDAB7368. The present invention includes a recombinant expression vector pDAB7369. The present invention includes a recombinant expression vector pDAB7370. The present invention includes a recombinant expression vector pDAB100518. The present invention includes a recombinant expression vector pDAB101476. The present invention includes a recombinant expression vector pDAB9166. The present invention includes a recombinant expression vector pDAB9167. The present invention includes a recombinant expression vector pDAB7379. The present invention includes a recombinant expression vector pDAB7380. The present invention includes a recombinant expression vector pDAB9323. The present invention includes a recombinant expression vector pDAB9330. The present invention includes a recombinant expression vector pDAB9337. The present invention includes a recombinant expression vector pDAB9338. The present invention includes a recombinant expression vector pDAB9344. The present invention includes a recombinant expression vector pDAB9396. The present invention includes a recombinant expression vector pDAB101412. The present invention includes a recombinant expression vector pDAB7733. The present invention includes a recombinant expression vector pDAB7734. The present invention includes a recombinant expression vector pDAB101493. The present invention includes a recombinant expression vector pDAB109507. The present invention includes a recombinant expression vector pDAB109508. The present invention includes a recombinant expression vector pDAB109509. The present invention includes a recombinant expression vector pDAB9151. The present invention includes a recombinant expression vector pDAB108207. The present invention includes a recombinant expression vector pDAB108208. The present invention includes a recombinant expression vector pDAB108209. The present invention includes a recombinant expression vector pDAB9159. The present invention includes a recombinant expression vector pDAB9147. The present invention includes a recombinant expression vector pDAB108224. The present invention includes a recombinant expression vector pDAB108225.

[0197] As used herein, the term “transfection” is used to refer to any method by which an exogenous nucleic acid molecule (e.g., a recombinant nucleic acid molecule) can be inserted into a cell. The term “transformation” can be used interchangeably with the term “transfection” when such term is used to refer to the introduction of nucleic acid molecules into microbial cells, such as algae, bacteria and yeast, or into plant cells. In microbial and plant systems, the term “transformation” is used to describe an inherited change due to the acquisition of exogenous nucleic acids by the microorganism or plant and is essentially synonymous with the term “transfection.” In some embodiments, transfection techniques include, but are not limited to, transformation, particle bombardment, diffusion, active transport, bath sonication, electroporation, microinjection, lipofection, adsorption, infection and protoplast fusion.

[0198] A widely utilized method for introducing an expression vector into plants is based on the natural transformation system of Agrobacterium. Horsch et al., Science 227:1229 (1985). A. tumefaciens and A. rhizogenes are plant pathogenic soil bacteria known to be useful to genetically transform plant cells. The Ti and Ri plasmids of A. tumefaciens and A. rhizogenes, respectively, carry genes responsible for genetic transformation of the plant. Kado, C. I., Crit. Rev. Plant. Sci. 10:1 (1991). Descriptions of Agrobacterium vector systems and methods for Agrobacterium-mediated gene transfer are also available, for example, Gruber et al., supra, Miki et al., supra, Moloney et al., Plant Cell Reports 8:238 (1989), and U.S. Pat. Nos. 4,940,838 and 5,464,763.

[0199] Another known method of plant transformation is microprojectile-mediated transformation wherein DNA is carried on the surface of microprojectiles. In this method, the expression vector is introduced into plant tissues with a biolistic device that accelerates the microprojectiles to speeds sufficient to penetrate plant cell walls and membranes. Sanford et al., Part. Sci. Technol. 5:27 (1987), Sanford, J. C., Trends Biotech. 6:299 (1988), Sanford, J. C., Physiol. Plant 79:206 (1990), Klein et al., Biotechnology 10:268 (1992).

[0200] Yet another method for physical delivery of DNA to plants is sonication of target cells. Zhang et al., Bio/Technology 9:996 (1991). Also, liposome or spheroplast fusion have been used to introduce expression vectors into plants. Deshayes et al., EMBO J., 4:2731 (1985), Christou et al., Proc Natl. Acad. Sci. USA 84:3962 (1987). Direct uptake of DNA into protoplasts using CaCl₂ precipitation, polyvinyl alcohol or poly-L-ornithine have also been reported. Hain et al., Mol. Gen. Genet. 199:161 (1985) and Draper et al., Plant Cell Physiol. 23:451 (1982). Electroporation of protoplasts and whole cells and tissues has also been described. Donn et al., Abstracts of VIIth International Congress on Plant Cell and Tissue Culture IAPTC, A2-38, p. 53 (1990); D'Halluin et al., Plant Cell 4:1495-1505 (1992) and Spencer et al., Plant Mol. Biol. 24:51-61 (1994). Additionally, silicone carbide whiskers (Kaepler et al., 1990, Plant Cell Reports) and in plant transformation using, for example, a flower dipping methodology (Clough and Bent, Plant J. 16:735-743 (1998)) can also be used. The exact plant transformation methodology can vary somewhat depending on the plant species selected and the plant cell type selected for transformation (e.g., seedling derived cell types such as hypocotyls and cotelydons or embryonic tissue).

[0201] Following the introduction of the genetic construct into plant cells, plant cells can be grown and upon emergence of differentiating tissue such as shoots and roots, mature plants can be generated. In some embodiments, a plurality of plants can be generated. Methodologies for regenerating plants are known to those of ordinary skill in the art and can be found, for example, in: Plant Cell and Tissue Culture, 1994, Vasil and Thorpe Eds. Kluwer Academic Publishers and in: Plant Cell Culture Protocols (Methods in Molecular Biology 111, 1999 Hall Eds Humana Press).

[0202] In some embodiments, a genetically modified plant described herein can be cultured in a fermentation medium or grown in a suitable medium such as soil. In some embodiments, a suitable growth medium for higher plants can include any growth medium for plants, including, but not limited to, soil, sand, any other particulate media that support root growth (e.g., vermiculite, perlite, etc.) or hydroponic culture, as well as suitable light, water and nutritional supplements which optimize the growth of the higher plant.

[0203] It will be appreciated by one skilled in the art that use of recombinant DNA technologies can improve control of expression of transfected nucleic acid molecules by manipulating, for example, the number of copies of the nucleic acid molecules within the host cell, the efficiency with which those nucleic acid molecules are transcribed, the efficiency with which the resultant transcripts are translated, and the efficiency of post-translational modifications. Additionally, the promoter sequence might be genetically engineered to improve the level of expression as compared to the native promoter. Recombinant techniques useful for controlling the expression of nucleic acid molecules include, but are not limited to, integration of the nucleic acid molecules into one or more host cell chromosomes, addition of vector stability sequences to plasmids, substitutions or modifications of transcription control signals (e.g., promoters, operators, enhancers), substitutions or modifications of translational control signals (e.g., ribosome binding sites, Shine-Dalgarno sequences), modification of nucleic acid molecules to correspond to the codon usage of the host cell, and deletion of sequences that destabilize transcripts.

[0204] In some embodiments, a plant can include those plants that are known to produce compounds used as pharmaceutical agents, flavoring agents, nutraceutical agents, functional food ingredients or cosmetically active agents or plants that are genetically engineered to produce these compounds/agents.

[0205] All of these embodiments of the invention apply to the discussion of any of the genetically modified organisms and methods of producing and using such organisms as described herein.

Products from Genetically Modified Organisms

[0206] In some embodiments, a genetically modified organism of the invention produces one or more polyunsaturated fatty acids including, but not limited to, EPA (C20:5, n-3), DHA (C22:6, n-3), DPA (C22:5, n-6 or n-3), ARA (C20:4, n-6), GLA (C18:3, n-6), ALA (C18:3, n-3), and/or SDA (C18:4, n-3)), and in some embodiments, one or more longer-chain PUFAs, including, but not limited to, EPA (C20:5, n-3), DHA (C22:6, n-3), DPA (C22:5, n-6 or n-3), or DTA (C22:4, n-6), or any combination thereof. In some embodiments, a genetically modified plant of the invention produces one or more polyunsaturated fatty acids including, but not limited to, EPA (C20:5, n-3), DHA (C22:6, n-3), and/or DPA (C22:5, n-6 or n-3), or any combination thereof.

[0207] In some embodiments, a genetically modified organism is a plant that has been genetically modified to recombinantly express a PUFA synthase system and a PPTase, as described herein. In some embodiments, such a plant has been genetically modified further to express an accessory protein as described herein for the improvement of the production and/or accumulation of PUFAs (or other bioactive products of the PUFA synthase) by the host (e.g., ACoAS, GPAT, LPAAT, DAGAT or ACCase).

[0208] Some embodiments of the present invention include the production of polyunsaturated fatty acids of desired chain length and with desired numbers of double bonds and, by extension, oil seed and oils obtained from the genetically modified plants described herein (e.g., obtained from the oil or seeds of such plants) comprising these PUFAs. Examples of PUFAs that can be produced by the present invention include, but are not limited to, DHA (docosahexaenoic acid (C22:6, n-3)), ARA (eicosatetraenoic acid or arachidonic acid (C20:4, n-6)), DPA (docosapentaenoic acid (C22:5, n-6 or n-3)), and EPA (eicosapentaenoic acid (C20:5, n-3)), and any combinations thereof. The present invention allows for the production of commercially valuable lipids enriched in one or more desired (target or primary) PUFAs by the present inventors' development of genetically modified plants through the use of a PUFA synthase system that produces PUFAs.

[0209] In some embodiments, a given PUFA synthase system derived from a particular organism will produce particular PUFA(s), such that selection of a PUFA synthase system from a particular organism will result in the production of specified target or primary PUFAs. In some embodiments, the ratio of the PUFAs can differ depending on the selection of the particular PUFA synthase system and on how that system responds to the specific conditions in which it is expressed. For example, use of a PUFA synthase from Thraustochytrium 23B (ATCC No. 20892) can also result in the production of DHA and DPAn-6 as the target or primary PUFAs; however, in the case of Thraustochytrium 23B, the ratio of DHA to DPAn-6 is about 10:1 (and can range from about 8:1 to about 40:1), whereas in Schizochytrium, the ratio is typically about 2.5:1. In some embodiments, a given PUFA synthase can be modified by intermixing proteins and domains from different PUFA synthases, or one can modify a domain or protein of a given PUFA synthase to change the target PUFA product and/or ratios.

[0210] In some embodiments, reference to “intermediate products” or “side products” of an enzyme system that produces PUFAs refers to any products, and particularly, fatty acid products, that are produced by the enzyme system as a result of the production of the target or primary PUFA(s) of the system, but which are not the primary or target PUFA(s). In some embodiments, intermediate and side products can include non-target fatty acids that are naturally produced by the wild-type plant, or by the parent plant used as a recipient for the indicated genetic modification, but are now classified as intermediate or side products because they are produced in greater levels as a result of the genetic modification, as compared to the levels produced by the wild-type plant, or by the parent plant used as a recipient for the indicated genetic modification. In some embodiments, a primary or target PUFA of one enzyme system can be an intermediate of a different enzyme system where the primary or target product is a different PUPA. For example, when using the standard pathway to produce EPA, fatty acids such as GLA, DGLA and SDA are produced as intermediate products if significant quantities (e.g., U.S. Appl. Pub. No. 2004/0172682). Similarly, and also illustrated by U.S. Appl. Pub. No. 2004/0172682, when using the standard pathway to produce DHA, in addition to the fatty acids mentioned above, ETA and EPA (notably the target PUFA in the first example above) can be produced in significant quantities and can be present in significantly greater quantities relative to the total fatty acid product than the target PUFA itself.

[0211] In some embodiments, to produce significantly high yields of one or more desired polyunsaturated fatty acids, a plant can be genetically modified to introduce a PUFA synthase system into the plant. Plants are not known to endogenously contain a PUFA synthase, and therefore, the present invention represents an opportunity to produce plants with unique fatty acid production capabilities. The present invention provides genetically engineered plants to produce one or more PUFAs in the same plant, including, but not limited to, EPA, DHA, DPA (n3 or n6), ARA, GLA, SDA and others, including any combination thereof. The present invention offers the ability to create any one of a number of “designer oils” in various ratios and forms. In some embodiments, the use of a PUFA synthase system from the particular marine organisms described herein can extend the range of PUPA production and successfully produce such PUFAs within temperature ranges used to grow most crop plants.

[0212] In some embodiments, to be “substantially free” of intermediate or side products of the system for synthesizing PUFAs, or to not have intermediate or side products present in substantial amounts, means that any intermediate or side product fatty acids (non-target PUFAs) that are produced in the genetically modified plant (and/or parts of plants and/or seed oil fraction) as a result of the introduction or presence of the enzyme system for producing PUFAs (e.g., that are not produced by the wild-type plant or the parent plant used as a recipient for the indicated genetic modification), can be present in a quantity that is less than about 10% by weight of the total fatty acids produced by the plant, and more preferably less than about 9%, and more preferably less than about 8%, and more preferably less than about 7%, and more preferably less than about 6%, and more preferably less than about 5%, and more preferably less than about 4%, and more preferably less than about 3%, and more preferably less than about 2%, and more preferably less than about 1% by weight of the total fatty acids produced by the plant, and more preferably less than about 0.5% by weight of the total fatty acids produced by the plant.

[0213] In some embodiments, a genetically modified plant of the invention or an oil or seed obtained from a genetically modified plant of the invention comprises detectable amounts of DHA (docosahexaenoic acid (C22:6, n-3)) or EPA (eicosapentaenoic acid (C20:5, n-3)). In some embodiments, a genetically modified plant of the invention or an oil or seed obtained from a genetically modified plant of the invention comprises 0.01%, 0.02%, 0.03%, 0.04%, 0.05%, 0.06%, 0.07%, 0.08%, 0.09%, 0.1%, 0.2%, 0.3%, 0.4%, 0.5%, 0.6%, 0.7%, 0.8%, 0.9%, 1%, 1.5%, 2%, 2.5%, 3%, 3.5%, 4%, 4.5%, 5%, 5.5%, 6%, 6.5%, 7%, 7.5%, 8%, 8.5%, 9%, 9.5%, 10%, 10.5%, 11%, 11.5%, 12%, 12.5%, 13%, 13.5%, 14%, 14.5% or 15% DHA. Useful ranges can be selected between any of these values, for example, 0.01-15%, 0.05-10% and 1-5% DHA.

[0214] In some embodiments, a genetically modified plant or the invention or an oil or seed obtained from a genetically modified plant of the invention comprises 0.01%, 0.02%, 0.03%, 0.04%, 0.05%, 0.06%, 0.07%, 0.08%, 0.09%, 0.1%, 0.2%, 0.3%, 0.4%, 0.5%, 0.6%, 0.7%, 0.8%, 0.9%, 1%, 1.5%, 2%, 2.5%, 3%, 3.5%, 4%, 4.5%, 5%, 5.5%, 6%, 6.5%, 7%, 7.5%, 8%, 8.5%, 9%, 9.5%, or 10% EPA. Useful ranges can be selected between any of these values, for example, 0.01-10%, 0.05-5% and 0.1-5% EPA.

[0215] In some embodiments, when the target product of a PUFA synthase system is a long chain PUFA, such as DHA, DPA (n-6 or n-3), or EPA, intermediate products and side products that are not present in substantial amounts in the total lipids of plants genetically modified with such a PUFA synthase system can include, but are not limited to: gamma-linolenic acid (GLA; 18:3, n-6); stearidonic acid (STA or SDA; 18:4, n-3); dihomo-gamma-linolenic acid (DGLA or HGLA; 20:3, n-6), arachidonic acid (ARA, C20:4, n-6); eicosatrienoic acid (ETA; 20:3, n-9) and various other intermediate or side products, such as 20:0; 20:1 (Δ5); 20:1 (Δ11); 20:2 (Δ8,11); 20:2 (Δ11,14); 20:3 (Δ5,11,14); 20:3 (Δ11,14,17); mead acid (20:3; Δ5,8,11); or 20:4 (Δ5,1,14,17).

[0216] The genetic modification of a plant according to the present invention can result in the production of one or more PUFAs by the plant. In some embodiments, the PUFA profile and the ratio of the PUFAs produced by the plant are not necessarily the same as the PUFA profile or ratio of PUFAs produced by the organism from which the PUFA synthase was derived.

[0217] In some embodiments, a genetically modified plant of the present invention can be engineered to produce PUFAs through the activity of the PUFA synthase. In some embodiments, the PUFAs can be recovered through purification processes which extract the compounds from the plant. In some embodiments, the PUFAs can be recovered by harvesting the plant. In some embodiments, the PUFAs can be recovered by harvesting the oil from the plant (e.g., from the oil seeds) or seeds from the plant. In some embodiments, the plant can also be consumed in its natural state or further processed into consumable products.

[0218] In some embodiments, a genetically modified plant of the invention can produce one or more polyunsaturated fatty acids. In some embodiments, the plant can produce (e.g., in its mature seeds, if an oil seed plant, or in the oil of the seeds of an oil seed plant) at least one PUFA (the target PUFA), and wherein the total fatty acid profile in the plant, or the part of the plant that accumulates PUFAs (e.g., mature seeds, if the plant is an oil seed plant or the oil of the seeds of an oil seed plant), comprises a detectable amount of this PUFA or PUFAs. In some embodiments, the target PUFA is at least a 20 carbon PUFA and comprises at least 3 double bonds, and more preferably at least 4 double bonds, and even more preferably, at least 5 double bonds. In some embodiments, the target PUFA can be a PUFA that is not naturally produced by the plant. In some embodiments, the total fatty acid profile in the plant or in the part of the plant that accumulates PUFAs (including the seed oil of the plant) comprises at least 0.1% of the target PUFA(s) by weight of the total fatty acids, at least 0.2%, at least 0.3%, at least 0.4%, at least 0.5%, at least 1%, at least 1.5%, at least 2%, at least 2.5%, at least 3%, at least 3.5%, at least 4%, at least 4.5%, at least 5%, at least 5.5%, at least 10%, at least 15%, at least 20%, at least 25%, at least 30%, at least 35%, at least 40%, at least 45%, at least 50%, at least 55%, at least 60%, at least 65%, at least 70%, at least 75%, more than 75% of at least one polyunsaturated fatty acid (the target PUFA or PUFAs) by weight of the total fatty acids produced by the plant, or any percentage from 0.1% to 75%, or greater than 75% (up to 100% or 100%), in 0.1% increments, of the target PUFA(s).

[0219] As generally used herein, reference to a percentage amount of PUFA production is by weight of the total fatty acids produced by the organism (plant), unless otherwise stated. In some embodiments, total fatty acids produced by a plant are presented as a weight percent as determined by gas chromatography (GC) analysis of a fatty acid methyl ester (FAME) preparation, although determination of total fatty acids is not limited to this method.

[0220] In some embodiments, the total fatty acids in a plant of the invention (and/or parts of plants or seed oil fraction) can contain less than 10% by weight of the total fatty acids produced by the plant, less than 9%, and less than 8%, less than 7%, less than 6%, less than 5%, less than 4%, less than 3%, less than 2%, less than 1% of a fatty acid selected from any one or more of: gamma-linolenic acid (GLA; 18:3, n-6); stearidonic acid (STA or SDA; 18:4, n-3); dihomo-gamma-linolenic acid (DGLA or HGLA; 20:3, n-6), arachidonic acid (ARA, C20:4, n-6); eicosatrienoic acid (ETA; 20:3, n-9) and various other fatty acids, such as 20:0; 20:1 (Δ5); 20:1 (Δ11); 20:2 (Δ8,11); 20:2 (Δ11,14); 20:3 (Δ5,11,14); 20:3 (Δ11,14,17); mead acid (20:3; Δ5,8,11); or 20:4 (Δ5,1,14,17).

[0221] The present invention includes any seed produced by the plants described herein, as well as any oil produced by a plant or seed of the present invention. The present invention also includes any products produced using the plants, seed or oils as described herein.

### Uses and Products Related to the Genetically Modified Organisms of the Invention

[0222] The present invention includes a method to produce PUFAs by growing or culturing a genetically modified organism (e.g., a plant) of the present invention described in detail above. In some embodiments, such a method includes, for example, the step of growing in a suitable environment, such as soil, a plant that has a genetic modification as described previously herein and in accordance with the present invention.

[0223] The present invention includes a method to produce an oil comprising at least one PUFA, comprising recovering oil from a genetically modified plant of the invention or from a seed of a genetically modified plant of the invention. The present invention includes a method to produce an oil comprising at least one PUFA, comprising growing a genetically modified plant of the invention. The present invention includes a method to produce at least one PUFA in a seed oil comprising recovering an oil from a seed of a genetically modified plant of the invention. The present invention includes a method to produce at least one PUFA in a seed oil comprising growing a genetically modified plant of the invention.

[0224] The present invention includes a method to provide a supplement or therapeutic product containing at least one PUFA to an individual, comprising providing to the individual a genetically modified plant of the invention, an oil of the invention, a seed of the invention, a food product of the invention, a functional food of the invention, or a pharmaceutical product of the invention. The present invention also includes a method to produce a genetically modified plant of the invention comprising transforming a plant or plant cell with (i) a nucleic acid sequence encoding an algal PUFA synthase system that produces at least one polyunsaturated fatty acid (PUFA); and (ii) a nucleic acid sequence encoding a phosphopantetheinyl transferase (PPTase) that transfers a phosphopantetheinyl cofactor to an algal PUFA synthase system ACP domain. In some embodiments, the method further comprises transforming the plant or plant cell with (iii) a nucleic acid sequence encoding an acyl-CoA synthetase (ACoAS) that catalyzes the conversion of long chain PUFA free fatty acids (FFA) to acyl-CoA.

[0225] In some embodiments, the PUFA of such methods is DHA or EPA.

[0226] The present invention further includes any organisms or parts thereof described herein (e.g., plants, parts of the plants (e.g., oil seeds), or preparations or fractions thereof), as well as any oils produced by the organisms described herein. The invention also includes any products produced using the organisms, parts thereof, or oils described herein.

[0227] The present invention relates to a method to modify a product containing at least one fatty acid, comprising adding to the product an organism, part thereof, or oil produced by a genetically modified organism according to the invention and as described herein (e.g., a plant that has been genetically modified as described herein). Any products produced by this method or generally containing any organisms, parts thereof, or oils from the organisms described herein are also encompassed by the invention.

[0228] In some embodiments, the product is selected from the group consisting of a food, a dietary supplement, a pharmaceutical formulation, a humanized animal milk, an infant formula, a nutraceutical and a functional food. Suitable pharmaceutical formulations include, but are not limited to, an anti-inflammatory formulation, a chemotherapeutic agent, an active excipient, an osteoporosis drug, an anti-depressant, an anti-convulsant, an anti-Helicobacter pylori drug, a drag for treatment of neurodegenerative disease, a drug for treatment of degenerative liver disease, an antibiotic, and a cholesterol lowering formulation. In some embodiments, the product is used to treat a condition selected from the group consisting of chronic inflammation, acute inflammation, gastrointestinal disorder, cancer, cachexia, cardiac restenosis, neurodegenerative disorder, degenerative disorder of the liver, blood lipid disorder, osteoporosis, osteoarthritis, autoimmune disease, preeclampsia, preterm birth, age related maculopathy, pulmonary disorder, and peroxisomal disorder.

[0229] In some embodiments, the product is a food product or functional food product. Suitable food products include, but are not limited to, fine bakery wares, bread and rolls, breakfast cereals, processed and unprocessed cheese, condiments (ketchup, mayonnaise, etc.), dairy products (milk, yogurt), puddings and gelatin desserts, carbonated drinks, teas, powdered beverage mixes, processed fish products, fruit-based drinks, chewing gum, hard confectionery, frozen dairy products, processed meat products, nut and nut-based spreads, pasta, processed poultry products, gravies and sauces, potato chips and other chips or crisps, chocolate and other confectionery, soups and soup mixes, soya based products (e.g., milks, drinks, creams, whiteners), vegetable oil-based spreads, and vegetable-based drinks.

[0230] In some embodiments of the invention, the product is a feed or meal composition, or an additive for a feed or meal composition, for an animal. The term animal includes all animals, including human beings. Non-limiting examples of animals are non-ruminants (e.g., pigs, poultry, or fish), and ruminants (e.g., cows, sheep and horses. The term feed or feed composition means any compound, preparation, mixture, or composition suitable for, or intended for intake by an animal.

[0231] In some embodiments, the genetically modified plant, seed or oil (e.g., canola) comprises reduced levels of polyunsaturated fatty acids and increased levels of monounsaturated oleic acid relative to conventional oils. Such a plant, seed or oil can exhibit, for example, higher oxidative stability. In some embodiments, the genetically modified plant, seed or oil comprises a high oleic acid oil background (e.g., 70%, 75%, 80%, 85%, 90%, 95%, 96%, 97%, 98% or 99% oleic acid). Such a plant, seed or oil can be, for example, less susceptible to oxidation during storage, frying and/or refining, and/or can be heated to a higher temperature without smoking, making it more suitable as a cooking oil. In some embodiments, the genetically modified plant, seed or oil comprises an amount of DHA as described herein and a high oleic oil background (e.g., an amount greater than or equal to 70%, including 70%, 75%, 80%, 85%, 90%, 95%, 96%, 97%, 98%, and 99% oleic acid and any ranges thereof). In some embodiments, the genetically modified plant, seed or oil comprises an amount of DHA as described herein and a low linolenic acid background (e.g., an amount less than or equal to 10%, including 9.5%, 9%, 8.5%, 8%, 7.5%, 7%, 6.5%, 6%, 5.5%, 5%, 4.5%, 4%, 3.5%, 3%, 2.5%, 2%, 1.5%, 1%, 0.05%, 0.02%, or 0.01% linolenic acid and any ranges thereof). In some embodiments, the genetically modified plant, seed or oil comprises an amount of DHA as described herein, a high oleic oil background (e.g., present in an amount greater than or equal to 70%, including 70%, 75%, 80%, 85%, 90%, 95%, 96%, 97%, 98%, and 99% oleic acid and any ranges thereof), and a low linolenic acid background (e.g., an amount less than or equal to 10%, including 9.5%, 9%, 8.5%, 8%, 7.5%, 7%, 6.5%, 6%, 5.5%, 5%, 4.5%, 4%, 3.5%, 3%, 2.5%, 2%, 1.5%, 1%, 0.05%, 0.02%, or 0.01% linolenic acid and any ranges thereof). In some embodiments, such a genetically modified plant, seed or oil (e.g., canola) can be incorporated into a product described herein.

[0232] Additional objects, advantages, and novel features of this invention will become apparent to those skilled in the art upon examination of the following examples thereof, which are not intended to be limiting.

### EXAMPLES

### Example 1

### Codon Optimization of PUFA Synthase OrfA, PUFA Synthase OrfB, PUFA Synthase OrfC, Acyl-CoA Synthetase and 4′ Phosphopantetheinyl Transferase HetI

[0233] Analysis of the DNA sequences encoding PUFA OrfA from Schizochytrium sp. ATCC 20888 (GenBank ID: AF378327, GI:158518688), PUFA OrfB from Schizochytrium sp. ATCC 20888 (GenBank ID: AF378328, GI:158518690), chimeric PUFA OrfC from Schizochytrium sp. ATCC_{—}20888 and Thraustochytrium (U.S. Appl. Pub. No. 2008/0022422) (“chimeric OrfC” or “hybrid OrfC”), acyl-CoA synthetase from Schizochytrium sp. ATCC 20888 (U.S. Appl. Pub. No. 2007/0245431), and 4′ phosphopantetheinyl transferase HetI from Nostoc sp. PCC 7120 (GenBank ID: P37695, GI:20141367) coding regions revealed the presence of several sequence motifs containing non-optimal codon compositions that can be detrimental to optimal plant expression. The design of the gene(s) encoding PUFA synthase OrfA, PUFA synthase OrfB, PUFA synthase chimeric OrfC, acyl-CoA synthetase and 4′ phosphopantetheinyl transferase HetI proteins was optimized to generate a DNA sequence that is more “plant-like” in nature, and in which the sequence modifications do not hinder translation or create mRNA instability through non-optimal codon composition.

[0234] Due to the plasticity afforded by the redundancy/degeneracy of the genetic code (e.g., some amino acids are specified by more than one codon), evolution of the genomes in different organisms or classes of organisms has resulted in differential usage of synonymous codons. This “codon bias” is reflected in the mean base composition of protein coding regions. For example, organisms having genomes with relatively low G+C contents utilize more codons having A or T in the third position of synonymous codons, whereas those having higher G+C contents utilize more codons having G or C in the third position. Further, it is thought that the presence of “minor” codons within an mRNA can reduce the absolute translation rate of that mRNA, especially when the relative abundance of the charged tRNA corresponding to the minor codon is low. An extension of this reasoning is that the diminution of translation rate by individual minor codons would be at least additive for multiple minor codons. Therefore, mRNAs having high relative contents of minor codons would have correspondingly low translation rates. This rate would be reflected by correspondingly low levels of the encoded protein.

[0235] In engineering genes encoding a PUFA synthase OrfA, PUFA synthase OrfB, PUFA synthase chimeric OrfC, acyl-CoA synthetase and 4′ phosphopantetheinyl transferase HetI protein for expression in canola (or other plants, such as rice, tobacco, maize, cotton or soybean), the codon usages for canola were accessed by publicly available databases (Table 2).

TABLE 2
Synonymous codon representation in coding regions of Brassica napus
(canola) genes (Columns C and G). Values for a balanced-biased codon
representation set for a plant-optimized synthetic gene design are in
Columns D and H.

| A | | C | D | E | | G | H |
|---|---|---|---|---|---|---|---|
| Amino | B | Canola | Weighted | Amino | F | Canola | Weighted |
| Acid | Codon | % | Average | Acid | Codon | % | Average |
| ALA (A) | GCA | 23.3 | 23.3 | LEU (L) | CTA | 10.1 | DNU |
| | GCC | 21.2 | 21.2 | | CTC | 22.8 | 28.5 |
| | GCG | 14.2 | 14.2 | | CTG | 116 | 14.6 |
| | GCT | 41.3 | 41.3 | | CTT | 25.2 | 31.6 |
| ARG (R) | AGA | 31.8 | 43.8 | | TTA | 10.1 | DNU |
| | AGG | 22.1 | 30.5 | | TTG | 20.2 | 25.3 |
| | CGA | 9.9 | DNU | LYS (K) | AAA | 44.6 | 44.6 |
| | CGC | 8.9 | DNU | | AAG | 55.4 | 55.4 |
| | CGG | 8.6 | DNU | MET (M) | ATG | 100.0 | 100.0 |
| | CGT | 18.6 | 25.7 | PHE (F) | TTC | 58.6 | 58.6 |
| ASN (N) | AAC | 62.6 | 62.6 | | TTT | 41.4 | 41.4 |
| | AAT | 37.4 | 37.4 | PRO (P) | CCA | 29.6 | 29.6 |
| ASP (D) | GAC | 42.5 | 42.5 | | CCC | 14.6 | 14.6 |
| | GAT | 57.5 | 57.5 | | CCG | 18.4 | 18.4 |
| CYS (C) | TGC | 49.2 | 49.2 | | CCT | 37.3 | 37.3 |
| | TGT | 50.8 | 50.8 | SER (S) | AGC | 16.0 | 17.9 |
| END | TAA | 38.5 | DNU | | ACT | 14.1 | 15.8 |
| | TAG | 22.1 | DNU | | TCA | 18.2 | 20.4 |
| | TGA | 39.4 | 100.0 | | TCC | 16.7 | 18.7 |
| GLN (Q) | CAA | 50.0 | 50.0 | | TCG | 10.7 | DNU |
| | CAG | 50.0 | 50.0 | | TCT | 24.3 | 27.2 |
| GLU (E) | GAA | 43.6 | 43.6 | THR (T) | ACA | 26.3 | 26.3 |
| | GAG | 56.4 | 56.4 | | ACC | 26.9 | 26.9 |
| GLY (G) | GGA | 36.4 | 36.4 | | ACG | 16.9 | 16.9 |
| | GGC | 16.2 | 16.2 | | ACT | 30.0 | 30.0 |
| | GGG | 15.2 | 15.2 | TRP (W) | TGG | 100.0 | 100.0 |
| | GGT | 32.1 | 32.1 | TYR (Y) | TAC | 59.4 | 59.4 |
| HIS (H) | CAC | 49.6 | 49.6 | | TAT | 40.6 | 40.6 |
| | CAT | 50.4 | 50.4 | VAL (V) | GTA | 10.8 | DNU |
| ILE (I) | ATA | 21.1 | 21.1 | | GTC | 24.1 | 27.0 |
| | ATC | 42.7 | 42.7 | | GTG | 28.3 | 31.7 |
| | ATT | 36.2 | 36.2 | | GTT | 36.8 | 41.3 |

*DNU = Do Not Use

[0236] To balance the distribution of the remaining codon choices for an amino acid, a Weighted Average representation for each codon was calculated (Table 2), using the formula:

[0237] Weighted Average % of C1=1/(% C1+% C2+% C3+ etc.)×% C1×100, where C1 is the codon in question and % C2, % C3, etc. represent the averages of the % values for canola of remaining synonymous codons (average % values for the relevant codons are taken from Columns C and G) of Table 2.

[0238] The Weighted Average % value for each codon is given in Columns D and H of Table 2.

[0239] In designing coding regions for plant expression, the primary (“first choice”) codons preferred by the plant was determined, as well as the second, third, fourth etc. choices of preferred codons when multiple choices exist. A new DNA sequence was then designed which encoded essentially the same amino acid sequence of an PUFA synthase OrfA, PUFA synthase OrfB, PUFA synthase OrfC, acyl-CoA synthetase and 4′ phosphopantetheinyl transferase HetI, but which differed from the original DNA sequence (encoding the PUFA synthase OrfA, PUFA synthase OrfB, PUFA synthase chimeric OrfC, acyl-CoA synthetase and 4′ phosphopantetheinyl transferase HetI) by the substitution of plant (first preferred, second preferred, third preferred, or fourth preferred, etc.) codons to specify the amino acid at each position within the amino acid sequence.

[0240] The new sequences were then analyzed for restriction enzyme sites created by the modifications in the sequence. The identified sites were then modified by replacing the codons with first, second, third, or fourth choice preferred codons. The sequence was then further analyzed and modified to reduce the frequency of TA or GC doublets.

[0241] Analysis of these sequences revealed that the new DNA sequences encoded essentially the amino acid sequence of the PUFA synthase OrfA, PUFA synthase OrfB, PUFA synthase chimeric OrfC, acyl-CoA synthetase and 4′ phosphopantetheinyl transferase HetI proteins but were respectively designed for optimal expression in canola using a balanced codon distribution of frequently used codons found in canola genes. In particular, the new DNA sequences differed from the original DNA sequences encoding an PUFA synthase OrfA, PUFA synthase OrfB, PUFA synthase chimeric OrfC, acyl-CoA synthetase and 4′ phosphopantetheinyl transferase HetI by the substitution of plant (first preferred, second preferred, third preferred, or fourth preferred) codons to specify the appropriate amino acid at each position within the protein amino acid sequence.

[0242] Design of the plant-optimized DNA sequences were initiated by reverse-translation of the protein sequences of SEQ ID NO:1, SEQ ID NO:2, SEQ ID NO:3, SEQ ID NO:4 and SEQ ID NO:5 using a canola codon bias table constructed from Table 2, Columns D and H. The protein sequence for acyl-CoA synthetase (SEQ ID NO:4) was altered from the original sequence; wherein the second amino acid Alanine was removed from the protein. The initial sequences were then modified by compensating codon changes (while retaining overall weighted average codon representation) to remove or add restriction enzyme recognition sites, remove highly stable intrastrand secondary structures, and remove other sequences that might be detrimental to cloning manipulations or expression of the engineered gene in plants. The DNA sequences were then re-analyzed for restriction enzyme recognition sites that might have been created by the modifications. The identified sites were further modified by replacing the relevant codons with first, second, third, or fourth choice preferred codons. Other sites in the sequences that could affect transcription or translation of the gene of interest include the exon:intron junctions (5′ or 3′), poly A addition signals, or RNA polymerase termination signals. The modified sequences were further analyzed and further modified to reduce the frequency of TA or CG doublets, and to increase the frequency of TG or CT doublets. In addition to these doublets, sequence blocks that have more than about six consecutive residues of [G+C] or [A+T] can affect transcription or translation of the sequence. Therefore, these sequence blocks were also modified by recycling the codons of first or second choice, etc. with other preferred codons of choice. Rarely used codons are not included to a substantial extent in the gene design, being used only when necessary to accommodate a different design criterion than codon composition per se (e.g., addition or deletion of restriction enzyme recognition sites).

[0243] The protein encoded by PUFA synthase OrfA comprises 10 repeated “Proline-Alanine” domains ranging in size from 17 to 29 amino acids. Interspersed between the Proline-Alanine repeats were 9 longer repeated sequence domains comprising 87 amino acids. The amino acid sequences of these repeats vary at only 4 positions, and there were only two amino acid choices at each of the variant positions. Analyses of the amino acid sequences of the 9 repeats using the Clustal W computer program generated a homology value of 100%, and an identity value of 95.4%. At the DNA level, the sequences encoding the 9 repeats are 100% homologous, 89.7% identical, varying at only 27 positions in the 261 bases encoding each repeat (23 of the 27 changes are “silent” differences, in which synonymous codons for the same amino acid are interchanged).

[0244] Standard gene design processes cannot easily accommodate developing new codon biased DNA sequences for multiple repeats of this size, since one must continually balance all the codon choices in an individual repeat with the codon choices made at the same position in the other 8 repeats, to avoid generating highly related DNA sequences. For each of the 87 residue repeats, there were more than 4.5×10⁴³ possible DNA sequences to encode the same amino acid sequence (calculated as the product of the number of synonymous codons for each amino acid in the sequence). Thus, there was a very large computing space available to generate identically-encoding DNA sequences. The following protocol describes a method used to generate (in silico) multiple sequence designs for each individual repeat, followed by comparison of all the sequence versions in bulk to identify a set that represents highly diverged sequences encoding the repeats:

[0245] Step 1: Extract the native DNA sequence encoding each repeated amino acid domain as a separate sequence.

[0246] Step 2: Import the individual repeated DNA sequences as separate sequences into a gene design program (e.g., OPTGENE™, Ocimum Biosolutions, Hyderabad, India). Steps 3-5 are performed on each sequence separately.

[0247] Step 3: Translate the DNA sequence using the standard genetic code.

[0248] Step 4: Reverse translate the translated protein sequence using the standard genetic code and the appropriate codon bias table. In this example, a biased codon table compiled from 530 Brassica napus protein coding regions was used, and each generated sequence was code-named “nap” (for “napus”) plus the version number. Thus, the first reverse-translated, codon biased sequence for Repeat 1 was named “rpt1 nap1” In this illustration, this process was performed 10 times, to generate 10 DNA sequence versions encoding the protein sequence of Repeat 1.

[0249] Step 5: Export the 10 sequence versions into the corresponding number of text files.

[0250] Step 6: Repeat Steps 3-5 for each of the other repeated sequence domains. In this illustration, a total of 90 “nap” sequence versions were generated (10 for each repeated element).

[0251] Step 7: Import the 90 sequence files into the Clustal W program Mega 3.1 (accessed at Megasoftware) and perform a multiple sequence alignment using all 90 sequences as input. Because these sequences are segments of protein coding regions, the alignments are performed with no gaps allowed. After Clustal W Alignment, a Neighbor-Joining tree is assembled and visualized, and one of the ten codon-optimized sequences for each of the nine repeated domains in the protein is picked visually. Each selected sequence version is chosen from a section of the tree that is the most deeply branched.

[0252] Step 8: The chosen sequence for each repeated domain is incorporated into the codon-optimized DNA sequence encoding the entire protein, in the proper position for each particular repeat.

[0253] Step 9: Final analyses of the entire codon optimized sequence, including the separately designed diverged repeat elements, are performed to assure the absence of undesired motifs, restriction enzyme recognition sites, etc.

[0254] The newly designed, canola optimized PUFA synthase OrfA, PUFA synthase OrfB, PUFA synthase OrfC, acyl-CoA synthetase and 4′ phosphopantetheinyl transferase HetI DNA sequences are listed, respectively, in SEQ ID NO:6, SEQ ID NO:7, SEQ ID NO:8, SEQ ID NO:9 and SEQ ID NO:10. These codon optimized sequences are identified as version 3 (v3) throughout the specification. The sequences labeled as version 2 (v2) describe the original noncodon optimized sequences.

[0255] The resulting DNA sequences have a higher degree of codon diversity, a desirable base composition, contain strategically placed restriction enzyme recognition sites, and lacks sequences that might interfere with transcription of the gene, or translation of the product mRNA. Table 3, Table 4, Table 5, Table 6 and Table 7 present the comparisons of the codon compositions of the coding regions for the PUFA synthase OrfA, PUFA synthase OrfB, PUFA synthase chimeric OrfC, acyl-CoA synthetase and 4′ phosphopantetheinyl transferase HetI proteins found in the original gene, the plant-optimized versions and the codon composition recommendations for a plant optimized sequence as calculated from Table 2, Columns D and H.

TABLE 3
PUFA OrfA codon compositions

| | | | | Plnt | Plnt | Plnt | | | | | Plnt | Plnt | Plnt |
|---|---|---|---|---|---|---|---|---|---|---|---|---|---|
| Amino | | Original | Original | Opt | Opt | Opt | Amino | | Original | Original | Opt | Opt | Opt |
| Acid | Codon | Gene # | Gene % | Gene # | Gene % | Recm′d | Acid | Codon | Gene # | Gene % | Gene # | Gene % | Recm′d |
| ALA (A) | GCA | 7 | 1.5 | 109 | 23.3 | 23.3 | LEU (L) | CTA | 0 | 0.0 | 0 | 0.0 | 0.0 |
| | GCC | 302 | 64.5 | 99 | 21.2 | 21.2 | | CTC | 173 | 77.9 | 63 | 28.4 | 28.5 |
| | GCG | 49 | 10.5 | 67 | 14.3 | 14.2 | | CTG | 15 | 6.8 | 32 | 14.4 | 14.6 |
| | GCT | 110 | 23.5 | 193 | 41.2 | 41.3 | | CTT | 33 | 14.9 | 71 | 32.0 | 31.6 |
| ARG (R) | AGA | 0 | 0.0 | 57 | 43.5 | 43.8 | | TTA | 3 | 0.0 | 0 | 0.0 | 0.0 |
| | AGG | 0 | 0.0 | 40 | 30.5 | 30.5 | | TTG | 1 | 0.5 | 56 | 25.2 | 25.3 |
| | CGA | 0 | 0.0 | 0 | 0.0 | 0.0 | LYS (K) | AAA | 2 | 1.2 | 73 | 44.5 | 44.6 |
| | CGC | 112 | 85.5 | 0 | 0.0 | 0.0 | | AAG | 162 | 98.8 | 91 | 55.5 | 55.4 |
| | CGG | 1 | 0.8 | 0 | 0.0 | 0.0 | MET (M) | ATG | 88 | 100 | 88 | 100 | 100.0 |
| | CGT | 18 | 13.7 | 34 | 26.0 | 25.7 | PHE (F) | TTC | 50 | 69.4 | 42 | 58.3 | 58.6 |
| ASN (N) | AAC | 73 | 97.3 | 47 | 62.7 | 62.6 | | TTT | 22 | 30.6 | 30 | 41.7 | 41.4 |
| | AAT | 2 | 2.7 | 28 | 37.3 | 37.4 | PRO (P) | CCA | 2 | 1.3 | 45 | 30.0 | 29.6 |
| ASP (D) | GAC | 126 | 76.8 | 70 | 42.7 | 42.5 | | CCC | 56 | 37.3 | 22 | 14.7 | 14.6 |
| | GAT | 38 | 23.2 | 94 | 57.3 | 57.5 | | CCG | 46 | 30.7 | 27 | 18.0 | 18.4 |
| CYS (C) | TGC | 34 | 94.4 | 18 | 50.0 | 49.2 | | CCT | 45 | 30.7 | 56 | 37.3 | 37.3 |
| | TGT | 2 | 5.6 | 18 | 50.0 | 50.8 | SER (S) | AGC | 40 | 21.3 | 34 | 18.1 | 17.9 |
| END | TAA | 1 | 100.0 | 0 | 0.0 | 0.0 | | AGT | 1 | 0.5 | 30 | 16.0 | 15.8 |
| | TAG | 0 | 0.0 | 0 | 0.0 | 0.0 | | TCA | 0 | 0.0 | 38 | 20.2 | 20.4 |
| | TGA | 0 | 0.0 | 1 | 100.0 | 100.0 | | TCC | 70 | 37.2 | 35 | 18.6 | 18.7 |
| GLN (Q) | CAA | 4 | 4.4 | 46 | 50.5 | 50.0 | | TCG | 59 | 31.4 | 0 | 0.0 | 0.0 |
| | CAG | 87 | 95.6 | 45 | 49.5 | 50.0 | | TCT | 18 | 9.6 | 51 | 27.1 | 27.2 |
| GLU (E) | GAA | 9 | 3.8 | 103 | 43.6 | 43.6 | THR (T) | ACA | 2 | 1.3 | 41 | 26.3 | 26.3 |
| 16 | GAG | 227 | 96.2 | 133 | 56.4 | 56.4 | | ACC | 81 | 51.9 | 42 | 26.9 | 26.9 |
| GLY (G) | GGA | 6 | 3.1 | 71 | 36.2 | 36.4 | | ACG | 26 | 16.7 | 26 | 16.7 | 16.9 |
| | GGC | 156 | 79.5 | 32 | 16.3 | 16.2 | | ACT | 47 | 30.1 | 47 | 30.1 | 30.0 |
| | GGG | 0 | 0.0 | 30 | 15.3 | 15.2 | TRP (W) | TGG | 13 | 100 | 13 | 100 | 100.0 |
| | GGT | 34 | 17.3 | 63 | 32.1 | 32.1 | TYR (Y) | TAC | 42 | 97.7 | 26 | 60.5 | 59.4 |
| HIS (H) | CAC | 25 | 83.3 | 15 | 50.0 | 49.6 | | TAT | 1 | 2.3 | 17 | 39.5 | 40.6 |
| | CAT | 5 | 16.7 | 15 | 50.0 | 50.4 | VAL (V) | GTA | 0 | 0.0 | 0 | 0.0 | 0.0 |
| ILE (I) | ATA | 0 | 0.0 | 29 | 21.0 | 21.1 | | GTC | 176 | 70.7 | 67 | 26.9 | 27.0 |
| | ATC | 99 | 71.7 | 59 | 42.7 | 42.7 | | GTG | 39 | 15.7 | 79 | 31.7 | 31.7 |
| | ATT | 39 | 28.3 | 50 | 36.2 | 36.2 | | GTT | 34 | 13.7 | 103 | 41.4 | 41.3 |
| | Totals | 1566 | | 1566 | | | | Totals | 1345 | | 1345 | | |

TABLE 4
PUFA OrfB codon compositions

| | | | | Plnt | Plnt | Plnt | | | | | Plnt | Plnt | Plnt |
|---|---|---|---|---|---|---|---|---|---|---|---|---|---|
| Amino | | Original | Original | Opt | Opt | Opt | Amino | | Original | Original | Opt | Opt | Opt |
| Acid | Codon | Gene # | Gene % | Gene # | Gene % | Recm′d | Acid | Codon | Gene # | Gene % | Gene # | Gene % | Recm′d |
| ALA (A) | GCA | 13 | 5.7 | 53 | 23.2 | 23.3 | LEU (L) | CTA | 0 | 0.0 | 0 | 0.0 | 0.0 |
| | GCC | 135 | 59.2 | 48 | 21.1 | 21.2 | | CTC | 116 | 63.0 | 51 | 27.7 | 28.5 |
| | GCG | 43 | 18.9 | 34 | 14.9 | 14.2 | | CTG | 21 | 11.4 | 27 | 14.7 | 14.6 |
| | GCT | 37 | 16.2 | 93 | 40.8 | 41.3 | | CTT | 44 | 23.9 | 59 | 32.1 | 31.6 |
| ARG (R) | AGA | 0 | 0.0 | 54 | 45.0 | 43.8 | | TTA | 0 | 0.0 | 0 | 0.0 | 0.0 |
| | AGG | 0 | 0.0 | 36 | 30.0 | 30.5 | | TTG | 3 | 1.6 | 47 | 25.5 | 25.3 |
| | CGA | 1 | 0.8 | 0 | 0.0 | 0.0 | LYS (K) | AAA | 10 | 8.8 | 52 | 45.6 | 44.6 |
| | CGC | 95 | 79.2 | 0 | 0.0 | 0.0 | | AAG | 104 | 91.2 | 62 | 54.4 | 55.4 |
| | CGG | 1 | 0.8 | 0 | 0.0 | 0.0 | MET (M) | ATG | 45 | 100 | 45 | 100 | 100.0 |
| | CGT | 23 | 19.2 | 30 | 25.0 | 25.7 | PHE (F) | TTC | 33 | 47.8 | 41 | 59.4 | 58.6 |
| ASN (N) | AAC | 75 | 89.3 | 51 | 60.7 | 62.6 | | TTT | 36 | 52.2 | 28 | 40.6 | 41.4 |
| | AAT | 9 | 10.7 | 33 | 39.3 | 37.4 | PRO (P) | CCA | 8 | 7.2 | 33 | 29.7 | 29.6 |
| ASP (D) | GAC | 86 | 72.3 | 52 | 43.7 | 42.5 | | CCC | 47 | 42.3 | 16 | 14.4 | 14.6 |
| | GAT | 33 | 27.7 | 67 | 56.3 | 57.5 | | CCG | 35 | 31.5 | 20 | 18.0 | 18.4 |
| CYS (C) | TGC | 41 | 100.0 | 20 | 48.8 | 49.2 | | CCT | 21 | 18.9 | 42 | 37.8 | 37.3 |
| | TGT | 0 | 0.0 | 21 | 51.2 | 50.8 | SER (S) | AGC | 40 | 26.5 | 28 | 18.5 | 17.9 |
| END | TAA | 1 | 100.0 | 0 | 0.0 | 0.0 | | AGT | 7 | 4.6 | 24 | 15.9 | 15.8 |
| | TAG | 0 | 0.0 | 0 | 0.0 | 0.0 | | TCA | 2 | 1.3 | 31 | 20.5 | 20.4 |
| | TGA | 0 | 0.0 | 1 | 100.0 | 100.0 | | TCC | 55 | 36.4 | 28 | 18.5 | 18.7 |
| GLN (Q) | CAA | 8 | 13.5 | 30 | 50.8 | 50.0 | | TCG | 33 | 21.9 | 0 | 0.0 | 0.0 |
| | CAG | 51 | 86.4 | 29 | 49.2 | 50.0 | | TCT | 14 | 9.3 | 40 | 26.5 | 27.2 |
| GLU (E) | GAA | 33 | 24.8 | 58 | 43.6 | 43.6 | THR (T) | ACA | 8 | 8.1 | 28 | 28.3 | 26.3 |
| 16 | GAG | 100 | 75.2 | 75 | 56.4 | 56.4 | | ACC | 58 | 58.6 | 24 | 24.2 | 26.9 |
| GLY (G) | GGA | 11 | 7.2 | 55 | 36.2 | 36.4 | | ACG | 26 | 26.3 | 16 | 16.2 | 16.9 |
| | GGC | 102 | 67.1 | 25 | 16.4 | 16.2 | | ACT | 7 | 7.1 | 31 | 31.3 | 30.0 |
| | GGG | 3 | 2.0 | 23 | 15.1 | 15.2 | TRP (W) | TGG | 22 | 100 | 22 | 100 | 100.0 |
| | GGT | 36 | 23.7 | 49 | 32.2 | 32.1 | TYR (Y) | TAC | 51 | 91.1 | 32 | 57.1 | 59.4 |
| HIS (H) | CAC | 27 | 76.3 | 19 | 50.0 | 49.6 | | TAT | 5 | 8.9 | 24 | 42.9 | 40.6 |
| | CAT | 9 | 23.7 | 19 | 50.0 | 50.4 | VAL (V) | GTA | 1 | 0.8 | 0 | 0.0 | 0.0 |
| ILE (I) | ATA | 0 | 0.0 | 22 | 21.2 | 21.1 | | GTC | 85 | 65.4 | 34 | 26.2 | 27.0 |
| | ATC | 67 | 64.4 | 44 | 42.3 | 42.7 | | GTG | 30 | 23.1 | 42 | 32.3 | 31.7 |
| | ATT | 37 | 35.6 | 38 | 36.5 | 36.2 | | GTT | 14 | 10.8 | 54 | 41.5 | 41.3 |
| | Totals | 1079 | | 1079 | | | | Totals | 981 | | 981 | | |

TABLE 5
PUFA chimeric OrfC codon compositions

| | | | | Plnt | Plnt | Plnt | | | | | Plnt | Plnt | Plnt |
|---|---|---|---|---|---|---|---|---|---|---|---|---|---|
| Amino | | Original | Original | Opt | Opt | Opt | Amino | | Original | Original | Opt | Opt | Opt |
| Acid | Codon | Gene # | Gene % | Gene # | Gene % | Recm′d | Acid | Codon | Gene # | Gene % | Gene # | Gene % | Recm′d |
| ALA (A) | GCA | 18 | 14.0 | 30 | 23.3 | 23.3 | LEU (L) | CTA | 2 | 1.6 | 0 | 0.0 | 0.0 |
| | GCC | 84 | 65.1 | 28 | 21.7 | 21.2 | | CTC | 78 | 63.9 | 34 | 27.9 | 28.5 |
| | GCG | 14 | 10.9 | 19 | 14.7 | 14.2 | | CTG | 18 | 14.8 | 18 | 14.8 | 14.6 |
| | GCT | 13 | 10.1 | 52 | 40.3 | 41.3 | | CTT | 16 | 13.1 | 39 | 32.0 | 31.6 |
| ARG (R) | AGA | 1 | 1.3 | 33 | 44.0 | 43.8 | | TTA | 1 | 0.8 | 0 | 0.0 | 0.0 |
| | AGG | 1 | 1.3 | 23 | 30.7 | 30.5 | | TTG | 7 | 5.7 | 31 | 25.4 | 25.3 |
| | CGA | 6 | 8.0 | 0 | 0.0 | 0.0 | LYS (K) | AAA | 15 | 16.1 | 42 | 45.2 | 44.6 |
| | CGC | 53 | 70.7 | 0 | 0.0 | 0.0 | | AAG | 78 | 83.9 | 51 | 54.8 | 55.4 |
| | CGG | 3 | 4.0 | 0 | 0.0 | 0.0 | MET (M) | ATG | 48 | 100 | 48 | 100 | 100.0 |
| | CGT | 11 | 14.7 | 19 | 25.3 | 25.7 | PHE (F) | TTC | 40 | 58.8 | 40 | 58.8 | 58.6 |
| ASN (N) | AAC | 63 | 90.0 | 43 | 61.4 | 62.6 | | TTT | 28 | 41.2 | 28 | 41.2 | 41.4 |
| | AAT | 7 | 10.0 | 27 | 38.6 | 37.4 | PRO (P) | CCA | 10 | 11.2 | 27 | 30.3 | 29.6 |
| ASP (D) | GAC | 70 | 76.9 | 40 | 44.0 | 42.5 | | CCC | 35 | 39.3 | 13 | 14.6 | 14.6 |
| | GAT | 21 | 23.1 | 51 | 56.0 | 57.5 | | CCG | 26 | 29.2 | 16 | 18.0 | 18.4 |
| CYS (C) | TGC | 26 | 81.3 | 16 | 50.0 | 49.2 | | CCT | 18 | 20.2 | 33 | 37.1 | 37.3 |
| | TGT | 6 | 18.8 | 16 | 50.0 | 50.8 | SER (S) | AGC | 16 | 19.0 | 13 | 15.5 | 17.9 |
| END | TAA | 1 | 100.0 | 0 | 0.0 | 0.0 | | AGT | 3 | 3.6 | 14 | 16.7 | 15.8 |
| | TAG | 0 | 0.0 | 0 | 0.0 | 0.0 | | TCA | 9 | 10.7 | 18 | 21.4 | 20.4 |
| | TGA | 0 | 0.0 | 1 | 100.0 | 100.0 | | TCC | 28 | 33.3 | 16 | 19.0 | 18.7 |
| GLN (Q) | CAA | 11 | 24.4 | 25 | 55.6 | 50.0 | | TCG | 21 | 25.0 | 0 | 0.0 | 0.0 |
| | CAG | 34 | 75.6 | 20 | 44.4 | 50.0 | | TCT | 7 | 8.3 | 23 | 27.4 | 27.2 |
| GLU (E) | GAA | 17 | 19.1 | 40 | 44.9 | 43.6 | THR (T) | ACA | 4 | 6.2 | 17 | 26.2 | 26.3 |
| 16 | GAG | 72 | 80.9 | 49 | 55.1 | 56.4 | | ACC | 41 | 63.1 | 17 | 26.2 | 26.9 |
| GLY (G) | GGA | 21 | 17.9 | 43 | 36.8 | 36.4 | | ACG | 8 | 12.3 | 11 | 16.9 | 16.9 |
| | GGC | 78 | 66.7 | 18 | 15.4 | 16.2 | | ACT | 12 | 18.5 | 20 | 30.8 | 30.0 |
| | GGG | 7 | 6.0 | 18 | 15.4 | 15.2 | TRP (W) | TGG | 18 | 100 | 18 | 100 | 100.0 |
| | GGT | 11 | 9.4 | 38 | 32.5 | 32.1 | TYR (Y) | TAC | 41 | 87.2 | 28 | 59.6 | 59.4 |
| HIS (H) | CAC | 24 | 85.7 | 14 | 50.0 | 49.6 | | TAT | 6 | 12.6 | 19 | 40.4 | 40.6 |
| | CAT | 4 | 14.3 | 14 | 50.0 | 50.4 | VAL (V) | GTA | 6 | 5.3 | 0 | 0.0 | 0.0 |
| ILE (I) | ATA | 0 | 0.0 | 15 | 21.7 | 21.1 | | GTC | 62 | 54.4 | 31 | 27.2 | 27.0 |
| | ATC | 48 | 69.6 | 30 | 43.5 | 42.7 | | GTG | 24 | 21.1 | 37 | 32.5 | 31.7 |
| | ATT | 21 | 30.4 | 24 | 34.8 | 36.2 | | GTT | 22 | 19.3 | 46 | 40.4 | 41.3 |
| | Totals | 746 | | 746 | | | | Totals | 748 | | 748 | | |

TABLE 6
Acyl-CoA synthetase codon compositions

| | | | | Plnt | Plnt | Plnt | | | | | Plnt | Plnt | Plnt |
|---|---|---|---|---|---|---|---|---|---|---|---|---|---|
| Amino | | Original | Original | Opt | Opt | Opt | Amino | | Original | Original | Opt | Opt | Opt |
| Acid | Codon | Gene # | Gene % | Gene # | Gene % | Recm′d | Acid | Codon | Gene # | Gene % | Gene # | Gene % | Recm′d |
| ALA (A) | GCA | 2 | 2.3 | 21 | 24.7 | 23.3 | LEU (L) | CTA | 0 | 0.0 | 0 | 0.0 | 0.0 |
| | GCC | 59 | 68.6 | 18 | 21.2 | 21.2 | | CTC | 35 | 63.6 | 15 | 27.3 | 28.5 |
| | GCG | 11 | 12.8 | 12 | 14.1 | 14.2 | | CTG | 6 | 10.9 | 9 | 16.4 | 14.6 |
| | GCT | 14 | 16.3 | 34 | 40.0 | 41.3 | | CTT | 13 | 23.6 | 17 | 30.9 | 31.6 |
| ARG (R) | AGA | 0 | 0.0 | 14 | 43.8 | 43.8 | | TTA | 0 | 0.0 | 0 | 0.0 | 0.0 |
| | AGG | 3 | 9.4 | 10 | 31.3 | 30.5 | | TTG | 1 | 1.8 | 14 | 25.5 | 25.3 |
| | CGA | 0 | 0.0 | 0 | 0.0 | 0.0 | LYS (K) | AAA | 2 | 4.1 | 22 | 44.9 | 44.6 |
| | CGC | 25 | 78.1 | 0 | 0.0 | 0.0 | | AAG | 47 | 95.9 | 27 | 55.1 | 55.4 |
| | CGG | 0 | 0.0 | 0 | 0.0 | 0.0 | MET (M) | ATG | 21 | 100 | 21 | 100 | 100.0 |
| | CGT | 4 | 12.5 | 8 | 25.0 | 25.7 | PHE (F) | TTC | 16 | 51.6 | 18 | 58.1 | 58.6 |
| ASN (N) | AAC | 22 | 95.7 | 14 | 60.9 | 62.6 | | TTT | 15 | 48.4 | 13 | 41.9 | 41.4 |
| | AAT | 1 | 4.3 | 9 | 39.1 | 37.4 | PRO (P) | CCA | 0 | 0.0 | 11 | 30.6 | 29.6 |
| ASP (D) | GAC | 38 | 74.5 | 22 | 43.1 | 42.5 | | CCC | 20 | 55.6 | 5 | 13.9 | 14.6 |
| | GAT | 13 | 25.5 | 29 | 56.9 | 57.5 | | CCG | 9 | 25.0 | 7 | 19.4 | 18.4 |
| CYS (C) | TGC | 11 | 91.7 | 6 | 50.0 | 49.2 | | CCT | 7 | 19.4 | 13 | 36.1 | 37.3 |
| | TGT | 1 | 8.3 | 6 | 50.0 | 50.8 | SER (S) | AGC | 7 | 17.5 | 7 | 17.5 | 17.9 |
| END | TAA | 1 | 100.0 | 0 | 0.0 | 0.0 | | AGT | 4 | 10.0 | 6 | 15.0 | 15.8 |
| | TAG | 0 | 0.0 | 0 | 0.0 | 0.0 | | TCA | 1 | 2.5 | 8 | 20.0 | 20.4 |
| | TGA | 0 | 0.0 | 1 | 100.0 | 100.0 | | TCC | 19 | 47.5 | 8 | 20.0 | 18.7 |
| GLN (Q) | CAA | 3 | 18.8 | 8 | 50.0 | 50.0 | | TCG | 7 | 17.5 | 0 | 0.0 | 0.0 |
| | CAG | 13 | 81.3 | 8 | 50.0 | 50.0 | | TCT | 2 | 5.0 | 11 | 27.5 | 27.2 |
| GLU (E) | GAA | 11 | 17.7 | 27 | 43.5 | 43.6 | THR (T) | ACA | 1 | 2.0 | 13 | 25.5 | 26.3 |
| 16 | GAG | 51 | 82.3 | 35 | 56.5 | 56.4 | | ACC | 27 | 52.9 | 14 | 27.5 | 26.9 |
| GLY (G) | GGA | 5 | 7.4 | 25 | 36.8 | 36.4 | | ACG | 19 | 37.3 | 9 | 17.6 | 16.9 |
| | GGC | 49 | 72.1 | 11 | 16.2 | 16.2 | | ACT | 4 | 7.8 | 15 | 29.4 | 30.0 |
| | GGG | 0 | 0.0 | 10 | 14.7 | 15.2 | TRP (W) | TGG | 10 | 100 | 10 | 100 | 100.0 |
| | GGT | 14 | 20.6 | 22 | 32.4 | 32.1 | TYR (Y) | TAC | 18 | 85.7 | 12 | 57.1 | 59.4 |
| HIS (H) | CAC | 10 | 83.3 | 6 | 50.0 | 49.6 | | TAT | 3 | 14.3 | 9 | 42.9 | 40.6 |
| | CAT | 2 | 16.7 | 6 | 50.0 | 50.4 | VAL (V) | GTA | 0 | 0.0 | 0 | 0.0 | 0.0 |
| ILE (I) | ATA | 0 | 0.0 | 10 | 21.3 | 21.1 | | GTC | 34 | 58.6 | 16 | 27.6 | 27.0 |
| | ATC | 27 | 57.4 | 20 | 42.6 | 42.7 | | GTG | 9 | 15.5 | 19 | 32.8 | 31.7 |
| | ATT | 20 | 42.6 | 17 | 36.2 | 36.2 | | GTT | 15 | 25.9 | 23 | 39.7 | 41.3 |
| | Totals | 410 | | 409 | | | | Totals | 372 | | 372 | | |

TABLE 7
Phosphopantetheinyl transferase HetI codon compositions

| | | | | Plnt | Plnt | Plnt | | | | | Plnt | Plnt | Plnt |
|---|---|---|---|---|---|---|---|---|---|---|---|---|---|
| Amino | | Original | Original | Opt | Opt | Opt | Amino | | Original | Original | Opt | Opt | Opt |
| Acid | Codon | Gene # | Gene % | Gene # | Gene % | Recm′d | Acid | Codon | Gene # | Gene % | Gene # | Gene % | Recm′d |
| ALA (A) | GCA | 4 | 20.0 | 5 | 25.0 | 23.3 | LEU (L) | CTA | 6 | 17.1 | 0 | 0.0 | 0.0 |
| | GCC | 6 | 30.0 | 4 | 20.0 | 21.2 | | CTC | 4 | 11.4 | 10 | 28.6 | 28.5 |
| | GCG | 2 | 10.0 | 3 | 15.0 | 14.2 | | CTG | 0 | 0.0 | 5 | 14.3 | 14.6 |
| | GCT | 8 | 40.0 | 8 | 40.0 | 41.3 | | CTT | 3 | 8.6 | 11 | 31.4 | 31.6 |
| ARG (R) | AGA | 1 | 6.3 | 6 | 37.5 | 43.8 | | TTA | 14 | 40.0 | 0 | 0.0 | 0.0 |
| | AGG | 1 | 6.3 | 5 | 31.3 | 30.5 | | TTG | 8 | 22.9 | 9 | 25.7 | 25.3 |
| | CGA | 2 | 12.5 | 0 | 0.0 | 0.0 | LYS (K) | AAA | 10 | 90.9 | 5 | 45.5 | 44.6 |
| | CGC | 6 | 37.5 | 0 | 0.0 | 0.0 | | AAG | 1 | 9.1 | 6 | 54.5 | 55.4 |
| | CGG | 1 | 6.3 | 0 | 0.0 | 0.0 | MET (M) | ATG | 1 | 100 | 1 | 100 | 100.0 |
| | CGT | 5 | 31.3 | 5 | 31.3 | 25.7 | PHE (F) | TTC | 3 | 25.0 | 6 | 50.0 | 58.6 |
| ASN (N) | AAC | 3 | 50.0 | 4 | 66.7 | 62.6 | | TTT | 9 | 75.0 | 6 | 50.0 | 41.4 |
| | AAT | 3 | 50.0 | 2 | 33.3 | 37.4 | PRO (P) | CCA | 9 | 56.3 | 5 | 31.3 | 29.6 |
| ASP (D) | GAC | 3 | 25.0 | 5 | 41.7 | 42.5 | | CCC | 6 | 37.5 | 2 | 12.5 | 14.6 |
| | GAT | 9 | 75.0 | 7 | 58.3 | 57.5 | | CCG | 1 | 6.3 | 3 | 18.8 | 18.4 |
| CYS (C) | TGC | 0 | 0.0 | 1 | 33.3 | 49.2 | | CCT | 0 | 0.0 | 6 | 37.5 | 37.3 |
| | TGT | 3 | 100.0 | 2 | 66.7 | 50.8 | SER (S) | AGC | 0 | 0.0 | 2 | 15.4 | 17.9 |
| END | TAA | 0 | 0.0 | 0 | 0.0 | 0.0 | | AGT | 4 | 30.8 | 2 | 15.4 | 15.8 |
| | TAG | 0 | 0.0. | 0 | 0.0 | 0.0 | | TCA | 3 | 23.1 | 3 | 23.1 | 20.4 |
| | TGA | 1 | 100.0 | 1 | 100.0 | 100.0 | | TCC | 3 | 23.1 | 2 | 15.4 | 18.7 |
| GLN (Q) | CAA | 5 | 45.5 | 5 | 45.5 | 50.0 | | TCG | 1 | 7.7 | 0 | 0.0 | 0.0 |
| | CAG | 6 | 54.5 | 6 | 54.5 | 50.0 | | TCT | 2 | 15.4 | 4 | 30.8 | 27.2 |
| GLU (E) | GAA | 13 | 72.2 | 8 | 44.4 | 43.6 | THR (T) | ACA | 3 | 27.3 | 3 | 27.3 | 26.3 |
| 16 | GAG | 5 | 27.8 | 10 | 55.6 | 56.4 | | ACC | 2 | 18.2 | 3 | 27.3 | 26.9 |
| GLY (G) | GGA | 0 | 0.0 | 5 | 35.7 | 36.4 | | ACG | 2 | 18.2 | 2 | 18.2 | 16.9 |
| | GGC | 5 | 35.7 | 2 | 14.3 | 16.2 | | ACT | 4 | 36.4 | 3 | 27.3 | 30.0 |
| | GGG | 2 | 14.3 | 2 | 14.3 | 15.2 | TRP (W) | TGG | 6 | 100 | 6 | 100 | 100.0 |
| | GGT | 7 | 50.0 | 5 | 35.7 | 32.1 | TYR (Y) | TAC | 2 | 22.2 | 5 | 55.6 | 59.4 |
| HIS (H) | CAC | 1 | 20.0 | 3 | 60.0 | 49.6 | | TAT | 7 | 77.8 | 4 | 44.4 | 40.6 |
| | CAT | 4 | 80.0 | 2 | 40.0 | 50.4 | VAL (V) | GTA | 0 | 0.0 | 0 | 0.0 | 0.0 |
| ILE (I) | ATA | 2 | 20.0 | 3 | 30.0 | 21.1 | | GTC | 1 | 12.5 | 2 | 25.0 | 27.0 |
| | ATC | 4 | 40.0 | 4 | 40.0 | 42.7 | | GTG | 3 | 37.5 | 3 | 37.5 | 31.7 |
| | ATT | 4 | 40.0 | 3 | 30.0 | 36.2 | | GTT | 4 | 50.0 | 3 | 37.5 | 41.3 |
| | Totals | 116 | | 116 | | | | Totals | 122 | | 122 | | |

[0256] After the codon optimization of the coding region sequences were completed, additional nucleotide sequences were added to the optimized coding region sequence. Restriction sites for the facilitation of cloning, a Kozak sequence and additional stop codons were added to the plant optimized coding sequence. In addition, a second series of PUFA synthase OrfA, PUFA synthase OrfB, PUFA synthase chimeric OrfC, acyl-CoA synthetase and phosphopantetheinyl transferase HetI coding sequences were designed which contained a chloroplast targeting sequence from the Arabidopsis thaliana Ribulose Bisphosphate Carboxylase small chain 1A (GenBank ID: NM_{—}202369.2). This sequence SEQ ID NO:11 was added to the previously described coding sequences for PUFA synthase OrfA, PUFA synthase OrfB, PUFA synthase chimeric OrfC and phosphopantetheinyl transferase HetI. The initial Methionine from SEQ ID NO:6, SEQ ID NO:7, SEQ ID NO:8, and SEQ ID NO:10 was removed and replaced with the chloroplast targeting sequence. The sequences which contain the chloroplast targeting sequence are identified as version 4 (v4) throughout the specification.

[0257] A second chloroplast transit peptide was added to the PUFA synthase OrfA, PUFA synthase OrfB, PUFA synthase chimeric OrfC, acyl-CoA synthetase and phosphopantetheinyl transferase HetI coding sequences. These coding sequences were designed to contain a chloroplast targeting sequence from acyl-ACP-thioesterase (GenBank ID: X73849.1). This sequence, SEQ ID NO:38, was added to the previously described coding sequences for PUFA synthase OrfA, PUFA synthase OrfB, PUFA synthase chimeric OrfC and phosphopantetheinyl transferase HetI. The initial Methionine from SEQ ID NO: 6, SEQ ID NO: 7, SEQ ID NO: 8, SEQ ID NO:9 and SEQ ID NO: 10 was removed and replaced with the chloroplast targeting sequence. The sequences which contain the chloroplast targeting sequence are identified as version 5 (v5) throughout the specification.

[0258] Once a plant-optimized DNA sequence has been designed on paper or in silico, actual DNA molecules can be synthesized in the laboratory to correspond in sequence precisely to the designed sequence. Such synthetic DNA molecules can be cloned and otherwise manipulated exactly as if they were derived from natural or native sources. Synthesis of DNA fragments comprising SEQ ID NO:6, SEQ ID NO:7, SEQ ID NO:8, SEQ ID NO:9 and SEQ ID NO:10 containing the additional sequences described above were performed by commercial suppliers (Geneart Ag, Regensburg, Germany). The synthetic DNA was then cloned into expression vectors and transformed into Agrobacterium and canola as described in Examples 2, 3, and 4.

[0259] Employing this method with the codon optimization of the PUFA synthase OrfA coding sequence resulted in the selection of repeated Proline-Alanine sequences that are sufficiently diverged to avoid repeated sequence instability. These sequences were chosen from the deepest branches of the Neighbor-Joining tree (i.e., are the most distantly related to one another in this sequence set). Smith-Wasserman global alignments were done for all pair wise combinations and the range of homology was 74-81% with a probable median of 76-77% (Table 8).

TABLE 8
Smith-Wasserman homologies of selected codon-optimized sequences of repeats of PUFA OrfA.

| | rpt1 nap9 | rpt2 nap10 | rpt3 nap10 | rpt4 nap1 | rpt5 nap10 | rpt6 nap6 | rpt7 nap9 | rpt8 nap4 | rpt9 nap10 |
|---|---|---|---|---|---|---|---|---|---|
| rpt1 nap9 | 100 | 77 | 74 | 77 | 74 | 77 | 81 | 76 | 76 |
| rpt2 nap10 | | 100 | 81 | 76 | 74 | 77 | 79 | 76 | 77 |
| rpt3 nap10 | | | 100 | 79 | 80 | 74 | 74 | 76 | 78 |
| rpt4 nap1 | | | | 100 | 80 | 77 | 75 | 76 | 76 |
| rpt5 nap10 | | | | | 100 | 78 | 77 | 77 | 77 |
| rpt6 nap6 | | | | | | 100 | 78 | 76 | 77 |
| rpt7 nap9 | | | | | | | 100 | 75 | 74 |
| rpt8 nap4 | | | | | | | | 100 | 76 |
| rpt9 nap10 | | | | | | | | | 100 |

[0260] A Clustal W alignment (Vector NTI, Invitrogen, Carlsbad, Calif.) of the chosen 9 newly designed coding regions for the 9 repeated domains is shown in FIG. 1. Overall, the sequences are 93.1% homologous, 61.7% identical as compared to the original sequences which were 100% homologous and 89.7% identical. Greater sequence divergence could be achieved by using more than 10 sequence iterations and employing a computer program or mathematical algorithm to select from these sequences (instead of choosing sequences visually). Nevertheless, the sequences exemplified are highly divergent, and produced stable poly-nucleotide fragments containing nucleotides.

### Example 2

### Plasmid Construction for pDAB7361, pDAB7362, pDAB7363, and Additional Constructs

[0261] Construction of pDAB7361

[0262] The pDAB7361 plasmid (FIG. 2; SEQ ID NO:35) was constructed using a multi-site Gateway recombination L-R reaction (Invitrogen, Carlsbad, Calif.). pDAB7361 contains three PUFA synthase plant transcription units (PTUs), one acyl-CoA synthetase PTU, one phosphopantetheinyl transferase PTU, and a phosphinothricin acetyl transferase PTU as follows. Specifically, the first PUFA synthase PTU contains a truncated Phaseolus vulgaris phytohemagglutinin-L gene promoter (PvDlec2 promoter v2; GenBank Accession Number X06336), Arabidopsis thaliana AT2S3 gene 5′ untranslated region (2S 5′ UTR; GenBank Accession Number NM_{—}118850), Schizochytrium sp. PolyUnsaturated Fatty Acid synthase Open Reading Frame A (Sz PUFA OrfA v2) and Arabidopsis thaliana 2S albumin gene 3′ untranslated region terminator v1 (At2S SSP terminator v1; GenBank Accession Number M22035). The second PUFA synthase PTU contains the PvDlec2 promoter v2, 2S 5′ UTR, Schizochytrium sp. PolyUnsaturated Fatty Acid synthase Open Reading Frame B (SzPUFA OrfB v3) and At2S SSP terminator v1. The third PUFA synthase PTU contains the PvDlec2 promoter v2, 2S 5′ UTR, Schizochytrium and Thraustochytrium sp. PolyUnsaturated Fatty Acid synthase Open Reading Frame C (hSzThPUFA OrfC v3) and At2S SSP terminator v1. The acyl-CoA synthetase PTU contains the PvDlec2 promoter v2, 2S 5′ UTR, Schizochytrium sp. acyl-CoA synthetase (SzACS-2 v3) and At2S SSP terminator v1. The phosphopantetheinyl transferase PTU contains the PvDlec2 promoter v2, 2S 5′ UTR, Nostoc sp. 4′ phosphopantetheinyl transferase HetI (NoHetI v3) and At2S SSP terminator v1.

[0263] Plasmids pDAB7355, pDAB7335, pDAB7336, pDAB7339 and pDAB7333 were recombined to form pDAB7361. Specifically, the five PTUs described above were placed in a head-to-tail orientation within the T-strand DNA border regions of the plant transformation binary pDAB7333. pDAB7333 also contains the phosphinothricin acetyl transferase PTU: Cassava vein Mosaic Virus Promoter (CsVMV promoter v2; Verdaguer et al., Plant Molecular Biology 31:1129-1139; 1996), phosphinothricin acetyl transferase (PAT v5; Wohlleben et al., Gene 70:25-37; 1988) and Agrobacterium tumefaciens ORF1 3′ untranslated region (AtuORF1 3′ UTR v4; Huang et al., J. Bacteriol. 172:1814-1822; 1990), in addition to other regulatory elements such as Overdrive (Toro et al., PNAS 85(22): 8558-8562; 1988) and T-stand border sequences (T-DNA Border A and T-DNA Border B; Gardner et al., Science 231:725-727; 1986 and WO 2001/025459 A1). Recombinant plasmids containing the five PTUs were then isolated and tested for incorporation of the five PTUs with restriction enzyme digestion and DNA sequencing.

Construction of pDAB7362

[0264] The pDAB7362 plasmid (FIG. 3; SEQ ID NO:36) was constructed using a multi-site Gateway L-R recombination reaction. pDAB7362 contains three PUFA synthase PTUs, one acyl-CoA synthetase PTU, one phosphopantetheinyl transferase PTU sequence and a phosphinothricin acetyl transferase PTU. Specifically, the first PUFA synthase PTU contains the PvDlec2 promoter v2, 2S 5′ UTR, SzPUFA OrfA v3 and At2S SSP terminator v1. The second PUFA synthase PTU contains the PvDlec2 promoter v2, 2S 5′ UTR, SzPUFA OrfB v3 and At2S SSP terminator v1. The third PUFA synthase PTU contains the PvDlec2 promoter v2, 2S 5′ UTR, hSzThPUFA OrfC v3 and At2S SSP terminator v1. The acyl-CoA synthetase PTU contains the PvDlec2 promoter v2, 2S 5′ UTR, SzACS-2 v3 gene and At2S SSP terminator v1. The phosphopantetheinyl transferase PTU contains the PvDlec2 promoter v2, 2S 5′ UTR, NoHetI v3 and At2S SSP terminator v1.

[0265] Plasmids pDAB7334, pDAB7335, pDAB7336, pDAB7339 and pDAB7333 were recombined to form pDAB7362. Specifically, the five PTUs described above were placed in a head-to-tail orientation within the T-strand DNA border regions of the plant transformation binary pDAB7333. pDAB7333 also contains the phosphinothricin acetyl transferase PTU: CsVMV promoter v2, PAT v5, AtuORF1 3′ UTR v4 in addition to other regulatory elements such as Overdrive and T-stand border sequences (T-DNA Border A and T-DNA Border B). Recombinant plasmids containing the five PTUs were then isolated and tested for incorporation of the five PTUs with restriction enzyme digestion and DNA sequencing.

Construction of pDAB7363

[0266] pDAB7363 (FIG. 4; SEQ ID NO:37) was constructed using a multi-site Gateway L-R recombination reaction. pDAB7363 contains three PUFA synthase PTUs, one acyl-CoA synthetase PTU and one phosphopantetheinyl transferase PTU sequence. Specifically, the first PUFA synthase PTU contains the PvDlec2 promoter v2, 2S 5′ UTR, SzPUFA OrfA v4 and At2S SSP terminator v1. The second PUFA synthase PTU contains the PvDlec2 promoter v2, 2S 5′ UTR, SzPUFA OrfB v4 and At2S SSP terminator v1. The third PUFA synthase PTU contains the PvDlec2 promoter v2, 2S 5′ UTR, hSzThPUFA OrfC v4 and At2S SSP terminator v1. The acyl-CoA synthetase PTU contains the PvDlec2 promoter v2, 2S 5′ UTR, SzACS-2 v3 gene and At2S SSP terminator v1. The phosphopantetheinyl transferase PTU contains the PvDlec2 promoter v2, 2S 5′ UTR, NoHetI v4 and At2S SSP terminator v1. In addition, all PTUs also contained the Arabidopsis thaliana Ribulose Bisphosphate Carboxylase small chain 1A chloroplast targeting sequence as indicated by the label “v4.”

[0267] Plasmids pDAB7340, pDAB7341, pDAB7342, pDAB7344 and pDAB7333 were recombined to form pDAB7363. Specifically, the five PTUs described above were placed in a head-to-tail orientation within the T-strand DNA border regions of the plant transformation binary pDAB7333 pDAB7333 also contains the phosphinothricin acetyl transferase PTU: CsVMV promoter v2, PAT v5, AtuORF1 3′ UTR v4 in addition to other regulatory elements such as Overdrive and T-stand border sequences (T-DNA Border A and T-DNA Border B). Recombinant plasmids containing the five PTUs were then isolated and tested for incorporation of the five PTUs w′ th restriction enzyme digestion and DNA sequencing.

Construction of pDAB7365

[0268] pDAB7365 is a binary plasmid that was constructed to contain native, non-codon optimized versions of SzPUFA OrfA v2, SzPUFA OrfB v2, hSzThPUFA OrfC v2, SzACS-2 v2, and NoHetI v2. The pDAB7365 plasmid (FIG. 19; SEQ ID NO:39) was constructed using a multi-site Gateway L-R recombination reaction. pDAB7365 contains three PUFA synthase PTUs, one acyl-CoA synthetase PTU, one phosphopantetheinyl transferase PTU and a phosphinothricin acetyl transferase PTU. Specifically, the first PUFA synthase PTU contains the PvDlec2 promoter v2, 2S 5′ UTR, SzPUFA OrfA v2 and At2S SSP terminator v1. The second PUFA synthase PTU contains the PvDlec2 promoter v2, 2S 5′ UTR, SzPUFA OrtB v2 and At2S SSP terminator v1. The third PUFA synthase PTU contains the PvDlec2 promoter v2, 2S 5′ UTR, SzPUFA OrfC v2 and At2S SSP terminator v1. The acyl-CoA synthetase PTU contains the PvDlec2 promoter v2, 2S 5′ UTR, SzACS-2 v2 gene and At2S SSP terminator v1. The phosphopantetheinyl transferase PTU contains the PvDlec2 promoter v2, 2S 5′ UTR, NoHetI v2 and At2S SSP terminator v1.

[0269] Plasmids pDAB7355, pDAB7356, pDAB7357, pDAB7360 and pDAB7333 were recombined to form pDAB7365. Specifically, the five PTUs described above were placed in a head-to-tail orientation within the T-strand DNA border regions of the plant transformation binary pDAB7333. The order of the genes is: SzPUFA OrfA v2, SzPUFA OrfB v2, SzPUFA OrfC v2, SzACS-2 v2, NoHetI v2. pDAB7333 also contains the phosphinothricin acetyl transferase PTU: CsVMV promoter v2, PAT v5, AtuORF1 3′UTR v4 in addition to other regulatory elements such as Overdrive and T-stand border sequences (T-DNA Border A and T-DNA Border B). Recombinant plasmids containing the five PTUs were then isolated and tested for incorporation of the six PTUs with restriction enzyme digestion and DNA sequencing.

Construction of pDAB7368

[0270] pDAB7368 is a binary plasmid that was constructed to contain native, non-codon optimized versions of SzPUFA OrfA v2, SzPUFA OrfB v2, hSzThPUFA OrfC v2, and NoHetI v2. This construct does not contain the SzACS-2 coding sequence. The pDAB7368 plasmid (FIG. 20; SEQ ID NO:40) was constructed using a multi-site Gateway L-R recombination reaction. pDAB7368 contains three PUFA synthase PTUs, one acyl-CoA synthetase PTU, one phosphopantetheinyl transferase PTU and a phosphinothricin acetyl transferase PTU. Specifically, the first PUFA synthase PTU contains the PvDlec2 promoter v2, 2S 5′ UTR, SzPUFA OrfA v2 and At2S SSP terminator v1. The second PUFA synthase PTU contains the PvDlec2 promoter v2, 2S 5′ UTR, SzPUFA OrfB v2 and At2S SSP terminator v1. The third PUFA synthase PTU contains the PvDlec2 promoter v2, 2S 5′ UTR, SzPUFA OrfC v2 and At2S SSP terminator v1. The phosphopantetheinyl transferase PTU contains the PvDlec2 promoter v2, 2S 5′ UTR, NoHetI v2 and At2S SSP terminator v1.

[0271] Plasmids pDAB7355, pDAB7356, pDAB7357, pDAB7359 and pDAB7333 were recombined to form pDAB7368. Specifically, the four PTUs described above were placed in a head-to-tail orientation within the T-strand DNA border regions of the plant transformation binary pDAB7333. The order of the genes is: SzPUFA OrfA v2, SzPUFA OrfB v2, SzPUFA OrfC v2, NoHetI v2. pDAB7333 also contains the phosphinothricin acetyl transferase PTU: CsVMV promoter v2, PAT v5, AtuORF1 3′UTR v4 in addition to other regulatory elements such as Overdrive and T-stand border sequences (T-DNA Border A and T-DNA Border B). Recombinant plasmids containing the five PTUs were then isolated and tested for incorporation of the five PTUs with restriction enzyme digestion and DNA sequencing.

Construction of pDAB7369

[0272] pDAB7369 is a binary plasmid that was constructed to contain rebuilt, codon optimized versions of SzPUFA OrfA v3, SzPUFA OrfB v3, hSzThPUFA OrfC v3, and NoHetI v3. This construct does not contain the SzACS-2 coding sequence PTU. The pDAB7369 plasmid (FIG. 21; SEQ ID NO:41) was constructed using a multi-site Gateway L-R recombination reaction. pDAB7369 contains three PUFA synthase PTUs, one acyl-CoA synthetase PTU, one phosphopantetheinyl transferase PTU and a phosphinothricin acetyl transferase PTU. Specifically, the first PUFA synthase PTU contains the PvDlec2 promoter v2, 2S 5′ UTR, SzPUFA OrfA v3 and At2S SSP terminator v1. The second PUFA synthase PTU contains the PvDlec2 promoter v2, 2S 5′ UTR, SzPUFA OrfB v3 and At2S SSP terminator v1. The third PUFA synthase PTU contains the PvDlec2 promoter v2, 2S 5′ UTR, hSzThPUFA OrfC v3 and At2S SSP terminator v1. The phosphopantetheinyl transferase PTU contains the PvDlec2 promoter v2, 2S 5′ UTR, NoHetI v3 and At2S SSP terminator v1.

[0273] Plasmids pDAB7334, pDAB7335, pDAB7336, pDAB7338 and pDAB7333 were recombined to form pDAB7369. Specifically, the four PTUs described above were placed in a head-to-tail orientation within the T-strand DNA border regions of the plant transformation binary pDAB7333. The order of the genes is: SzPUFA OrfA v3, SzPUFA OrfB v3, hSzThPUFA OrfC v3, NoHetI v3. pDAB7333 also contains the phosphinothricin acetyl transferase PTU: CsVMV promoter v2, PAT v5, AtuORF1 3′UTR v4 in addition to other regulatory elements such as Overdrive and T-stand border sequences (T-DNA Border A and T-DNA Border B). Recombinant plasmids containing the five PTUs were then isolated and tested for incorporation of the five PTUs with restriction enzyme digestion and DNA sequencing.

Construction of pDAB7370

[0274] pDAB7370 is a binary plasmid that was constructed to contain rebuilt, codon optimized versions of SzPUFA OrfA v4, SzPUFA OrfB v4, hSzThPUFA OrfC v4, and NoHetI v4 which contain the Ribulose Bisphosphate Carboxylase small chain 1A (labeled as SSU-TP v1) which is fused to the amino terminus of the coding sequence. This construct does not contain the SzACS-2 coding sequence PTU. The pDAB7370 plasmid (FIG. 22; SEQ ID NO:42) was constructed using a multi-site Gateway L-R recombination reaction. pDAB7370 contains three PUFA synthase PTUs, one acyl-CoA synthetase PTU, one phosphopantetheinyl transferase PTU and a phosphinothricin acetyl transferase PTU. Specifically, the first PUFA synthase PTU contains the PvDlec2 promoter v2, 2S 5′ UTR, SzPUFA OrfA v4 and At2S SSP terminator v1. The second PUFA synthase PTU contains the PvDlec2 promoter v2, 2S 5′ UTR, SzPUFA OrfB v4 and At2S SSP terminator v1. The third PUFA synthase PTU contains the PvDlec2 promoter v2, 2S 5′ UTR, hSzThPUFA OrfC v4 and At2S SSP terminator v1. The phosphopantetheinyl transferase PTU contains the PvDlec2 promoter v2, 2S 5′ UTR, NoHetI v4 and At2S SSP terminator v1.

[0275] Plasmids pDAB7340, pDAB7341, pDAB7342, pDAB7343 and pDAB7333 were recombined to form pDAB7370. Specifically, the four PTUs described above were placed in a head-to-tail orientation within the T-strand DNA border regions of the plant transformation binary pDAB7333. The order of the genes is: SzPUFA OrfA v4, SzPUFA OrfB v4, hSzThPUFA OrfC v4, NoHetI v4. pDAB7333 also contains the phosphinothricin acetyl transferase PTU: CsVMV promoter v2, PAT v5, AtuORF1 3′UTR v4 in addition to other regulatory elements such as Overdrive and T-stand border sequences (T-DNA Border A and T-DNA Border B). Recombinant plasmids containing the five PTUs were then isolated and tested for incorporation of the five PTUs with restriction enzyme digestion and DNA sequencing.

Construction of pDAB100518

[0276] pDAB100518 is a binary plasmid that was constructed to contain rebuilt, codon optimized versions of SzPUFA OrfA v5, SzPUFA OrfB v5, hSzThPUFA OrfC v5, and NoHetI v5 which contain the chloroplast transit peptide from acyl-ACP-thioesterase (labeled as Thioesterase Transit Peptide) which is fused to the amino terminus of the coding sequence. In addition, the plasmid contains a SzACS-2 v3 coding sequence PTU which does not possess a chloroplast transit peptide. The pDAB100518 plasmid (FIG. 23; SEQ ID NO:43) was constructed using a multi-site Gateway L-R recombination reaction. pDAB100518 contains three PUFA synthase PTUs, one acyl-CoA synthetase PTU, one phosphopantetheinyl transferase PTU and a phosphinothricin acetyl transferase PTU. Specifically, the first PUFA synthase PTU contains the PvDlec2 promoter v2, 2S 5′ UTR, SzPUFA OrfA v5 and At2S SSP terminator v1. The second PUFA synthase PTU contains the PvDlec2 promoter v2, 2S 5′ UTR, SzPUFA OrfB v5 and At2S SSP terminator v1. The third PUFA synthase PTU contains the PvDlec2 promoter v2, 2S 5′ UTR, hSzThPUFA OrfC v5 and At2S SSP terminator v1. The acyl-CoA synthetase PTU contains the PvDlec2 promoter v2, 2S 5′ UTR, SzACS-2 v3 gene and At2S SSP terminator v1. The phosphopantetheinyl transferase PTU contains the PvDlec2 promoter v2, 2S 5′ UTR, NoHetI v5 and At2S SSP terminator v1.

[0277] Plasmids pDAB100517, pDAB100514, pDAB100511, pDAB100515 and pDAB7333 were recombined to form pDAB100518. Specifically, the five PTUs described above were placed in a head-to-tail orientation within the T-strand DNA border regions of the plant transformation binary pDAB7333. The order of the genes is: SzPUFA OrfA v5, SzPUFA OrfB v5, hSzThPUFA OrfC v5, SzACS-2 v3, NoHetI v5. pDAB7333 also contains the phosphinothricin acetyl transferase PTU: CsVMV promoter v2, PAT v5, AtuORF1 3′UTR v4 in addition to other regulatory elements such as Overdrive and T-stand border sequences (T-DNA Border A and T-DNA Border B). Recombinant plasmids containing the six PTUs were then isolated and tested for incorporation of the six PTUs with restriction enzyme digestion and DNA sequencing.

Construction of pDAB101476

[0278] pDAB101476 is a binary plasmid that was constructed to contain rebuilt, codon optimized versions of SzPUFA OrfA v3, SzPUFA OrfB v3, hSzThPUFA OrfC v3, and NoHetI v3. The SzACS-2 v2 gene sequence is the native, non-codon optimized version. The pDAB101476 plasmid (FIG. 24; SEQ ID NO:44) was constructed using a multi-site Gateway L-R recombination reaction. pDAB101476 contains three PUFA synthase PTUs, one acyl-CoA synthetase PTU, one phosphopantetheinyl transferase PTU and a phosphinothricin acetyl transferase PTU. Specifically, the first PUFA synthase PTU contains the PvDlec2 promoter v2, 2S 5′ UTR, SzPUFA OrfA v3 and At2S SSP terminator v1. The second PUFA synthase PTU contains the PvDlec2 promoter v2, 2S 5′ UTR, SzPUFA OrfB v3 and At2S SSP terminator v1. The third PUFA synthase PTU contains the PvDlec2 promoter v2, 2S 5′ UTR, hSzThPUFA OrfC v3 and At2S SSP terminator v1. The acyl-CoA synthetase PTU contains the PvDlec2 promoter v2, 2S 5′ UTR, SzACS-2 v2 gene and At2S SSP terminator v1. The phosphopantetheinyl transferase PTU contains the PvDlec2 promoter v2, 2S 5′ UTR, NoHetI v3 and At2S SSP terminator v1.

[0279] Plasmids pDAB7334, pDAB7335, pDAB7336, pDAB101471 and pDAB7333 were recombined to form pDAB101476. Specifically, the five PTUs described above were placed in a head-to-tail orientation within the T-strand DNA border regions of the plant transformation binary pDAB7333. The order of the genes is: SzPUFA OrfA v3, SzPUFA OrfB v3, hSzThPUFA OrfC v3, SzACS-2 v2, NoHetI v3. pDAB7333 also contains the phosphinothricin acetyl transferase PTU: CsVMV promoter v2, PAT v5, AtuORF1 3′UTR v4 in addition to other regulatory elements such as Overdrive and T-stand border sequences (T-DNA Border A and T-DNA Border B). Recombinant plasmids containing the six PTUs were then isolated and tested for incorporation of the six PTUs with restriction enzyme digestion and DNA sequencing.

Construction of pDAB101477

[0280] pDAB101477 is a binary plasmid that was constructed to contain rebuilt, codon optimized versions of SzPUFA OrfA v3, SzPUFA OrfB v3, hSzThPUFA OrfC v3, and NoHetI v3. The pDAB101477 plasmid (FIG. 25; SEQ ID NO:45) was constructed using a multi-site Gateway L-R recombination reaction. pDAB101477 contains three PUFA synthase PTUs, one acyl-CoA synthetase PTU, one phosphopantetheinyl transferase PTU and a phosphinothricin acetyl transferase PTU. Specifically, the first PUFA synthase PTU contains the PvDlec2 promoter v2, 2S 5′ UTR, SzPUFA OrfA v3 and At2S SSP terminator v1. The second PUFA synthase PTU contains the PvDlec2 promoter v2, 2S 5′ UTR, SzPUFA OrfB v3 and At2S SSP terminator v1. The third PUFA synthase PTU contains the PvDlec2 promoter v2, 2S 5′ UTR, hSzThPUFA OrfC v3 and At2S SSP terminator v1. The acyl-CoA synthetase PTU contains the PvDlec2 promoter v2, 2S 5′ UTR, SzACS-2 v4 gene and At2S SSP terminator v1. The phosphopantetheinyl transferase PTU contains the PvDlec2 promoter v2, 2S 5′ UTR, NoHetI v3 and At2S SSP terminator v1.

[0281] Plasmids pDAB7334, pDAB7335, pDAB7336, pDAB101472 and pDAB7333 were recombined to form pDAB101477. Specifically, the five PTUs described above were placed in a head-to-tail orientation within the T-strand DNA border regions of the plant transformation binary pDAB7333. The order of the genes is: SzPUFA OrfA v3, SzPUFA OrfB v3, hSzThPUFA OrfC v3, SzACS-2 v4, NoHetI v3. pDAB7333 also contains the phosphinothricin acetyl transferase PTU: CsVMV promoter v2, PAT v5, AtuORF1 3′UTR v4 in addition to other regulatory elements such as Overdrive and T-stand border sequences (T-DNA Border A and T-DNA Border B). Recombinant plasmids containing the six PTUs were then isolated and tested for incorporation of the six PTUs with restriction enzyme digestion and DNA sequencing.

### Example 3

[0282] Agrobacterium Strain Production for Plasmids pDAB7361, pDAB7362, pDAB7363

[0283] The pDAB7361, pDAB7362 and pDAB7363 plasmids were transformed into Agrobacterium tumefaciens using standard electroporation techniques. Specifically, the Agrobacterium tumefaciens strain Z707S (Hepburn et al. J. Gen. Microbiol. 131:2961-2969 (1985)) was electroporated with the pDAB7361, pDAB7362 or pDAB7363 plasmids. Transformed colonies of Agrobacterium which contained the plasmids were selected and confirmed using restriction enzyme digestion. The Agrobacterium strains containing pDAB7361, pDAB7362 or pDAB7363 were stored as glycerol stocks at −80° C.

### Example 4

### Agrobacterium-Mediated Transformation of Canola

### Agrobacterium Preparation

[0284] A loop of glycerol stock of the Agrobacterium strains containing either pDAB7361, pDAB7362 or pDAB7363 was used to streak YEP (Bacto Peptone 20.0 gm/L and Yeast Extract 10.0 gm/L) plates containing streptomycin (100 mg/ml) and spectinomycin (50 mg/ml) and incubated for 2 days at 28° C. A loop of the 2-day streak plate was then inoculated into 150 mL modified YEP liquid with streptomycin (100 mg/ml) and spectinomycin (50 mg/ml) into sterile 500 mL baffled flask(s) and shaken at 200 rpm at 28° C. The cultures were resuspended in M—medium (LS salts, 3% glucose, modified B5 vitamins, 1 μM kinetin, 1 μM 2,4-D, pH 5.8) and diluted to the appropriate density (50 Klett Units) prior to transformation of canola hypocotyls.

### Canola Transformation

[0285] Seed Germination:

[0286] Canola seeds (variety Nexera 710) were surface-sterilized in 10% Clorox for 10 minutes and rinsed three times with sterile distilled water (seeds are contained in steel strainers during this process). Seeds were planted for germination on ½ MS Canola medium (1/2 MS, 2% sucrose, 0.8% Agar) contained in Phytatrays, 25 seeds per Phytatray and placed in a Percival chamber with growth regime set at 25° C., photoperiod of 16 hours light, 8 hours dark; and germinated for 5 days.

[0287] Pre-Treatment:

[0288] On day 5, ˜3 mm hypocotyl segments were aseptically excised, discarding the root and shoot sections (drying of hypocotyls was prevented by placing them into 10 ml of sterile milliQ water during excision process). Hypocotyl segments were placed horizontally on sterile filter paper on callus induction medium MSK1D1 (MS, 1 mg/l Kinetin, 1 mg/l 2,4-D, 3% sucrose, 0.7% Phytagar) for 3 days pre-treatment in a Percival chamber with growth regime set at 22-23° C., (photoperiod of 16 hours light, 8 hours dark).

[0289] Co-Cultivation with Agrobacterium:

[0290] The day before Agrobacterium treatment, flasks of YEP medium containing the appropriate antibiotics, were inoculated. Hypocotyl segments were transferred from filter paper to empty 100×25 mm petri dishes containing 10 ml of liquid M medium to prevent the hypocotyl segments from drying. A spatula was used at this stage to scoop the segments and transfer. The liquid M medium was removed with a pipette and 40 ml of Agrobacterium suspension added to the petri dish (500 segments with 40 ml of Agrobacterium solution). The segments were treated for 30 minutes with periodic swirling of the petri dish so that the hypocotyls stayed immersed in the Agrobacterium solution. At the end of the treatment period, the Agrobacterium solution was pipetted into a waste beaker, autoclaved and discarded (the Agrobacterium solution was completely removed to prevent Agrobacterium overgrowth). The treated hypocotyls were transferred with forceps back to the original plates containing MSK1D1 with filter paper (care was taken to ensure that the segments did not dry). The hypocotyl segments along with control segments were returned to the Percival chamber under reduced light intensity (by covering the plates with aluminum foil), and the treated hypocotyls co-cultivated with Agrobacterium for 3 days.

[0291] Callus Induction on Selection Medium:

[0292] After 3 days of co-cultivation, the hypocotyl segments were transferred individually with forceps onto callus induction medium MSK1D1H1 (MS. 1 mg/l Kinetin, 1 mg/l 2,4-D, 0.5 gm/l MES, 5 mg/l AgNO3, 300 mg/l Timentin, 200 mg/l Carbenicillin, 1 mg/l Herbiace, 3% sucrose, 0.7% Phytagar). The hypocotyl segments were anchored on the medium but were not embedded in the medium.

[0293] Selection and Shoot Regeneration:

[0294] After 7 days on callus induction medium, the callusing hypocotyl segments were transferred to Shoot Regeneration Medium 1 with selection MSB3Z1H1 (MS, 3 mg/l BAP, 1 mg/l Zeatin, 0.5 gm/l MES, 5 mg/l AgNO3, 300 mg/l Timentin, 200 mg/l Carbenicillin, 1 mg/l Herbiace, 3% sucrose, 0.7% Phytagar). After 14 days, the hypocotyls with shoots were transferred to Regeneration Medium 2 with increased selection MSB3Z1H3 (MS, 3 mg/l BAP, 1 mg/l Zeatin, 0.5 gm/l MES, 5 mg/l AgNO3, 300 mg/l Timentin, 200 mg/l Carbenicillin, 3 mg/l HERBIACE, 3% sucrose, 0.7% Phytagar).

[0295] Shoot Elongation:

[0296] After 14 days, the segments with shoots were transferred to shoot elongation medium MSMESH5 (MS, 300 mg/l Timentin, 5 mg/l Herbiace, 2% sucrose, 0.7% TC Agar). Shoots that were already elongated were isolated and transferred to MSMESH5. After 14 days the remaining shoots which had not elongated in the first round were placed on MSMESH5 and transferred to fresh selection medium of the same composition. At this stage all remaining hypocotyl segments were discarded.

[0297] Shoots that elongated on MSB3Z1H3 medium after 2 weeks were isolated and transferred to MSMESH5 medium. Remaining shoots that had not elongated in the first round on MSMESH5 were isolated and transferred to fresh selection medium of the same composition. At this stage all remaining hypocotyl segments were discarded.

[0298] Root Induction:

[0299] After 14 days, the shoots were transferred to MSMEST medium (MS, 0.5 g/l MES, 300 mg/l Timentin, 2% sucrose, 0.7% TC Agar for root induction. The shoots that did not root in the first transfer on MSMEST medium were transferred for a second or third cycle on MSMEST medium until rooted plants were obtained. The shoots that did not elongate or root in the first transfer on MSMEST medium were transferred for a second or third cycle on MSMEST medium until the rooted plants were obtained.

[0300] PCR Analysis:

[0301] Samples for PCR were isolated after the shoots were cultured on MSMESH5 medium for at least 14 days. Leaf tissue from the green shoots was tested by PCR for the presence of the PAT selectable marker gene. All chlorotic shoots were discarded and not subjected to the PAT assay. Samples that were positive for the PCR reaction were kept and the shoots were left on the MSMEST medium to elongate and develop roots. The shoots that were negative according to the PCR assay were discarded.

[0302] Plants that rooted on MSMESH5 or MSMEST and were PCR-positive were sent for transplanting into soil. After hardening, the T₀ canola plants were further analyzed for events which contained all of the transgene PTU cassettes and then plants were transferred to the greenhouse, grown to maturity and the seed was harvested for additional analysis.

### Example 5

### Copy Number Analysis and Detection of the Coding Region in Transgenic Canola

[0303] T₀ plants selected from Example 4 were further analyzed to identify plants which contained each of the transgene PTU expression cassettes. Invader and hydrolysis probe assays were performed to initially screen samples of putatively transformed T₀ plants to identify events which contained the PAT expression cassette. Subsequent PCR analysis of the PUFA synthase OrfA, PUFA synthase OrfB, PUFA synthase chimeric OrfC, acyl-CoA synthetase and 4′ phosphopantetheinyl transferase HetI gene expression cassettes were completed to further identify plants which contained the each gene expression cassette PTU from the binary vector used to transform the plants. Events containing all of the PTUs were selected for advancement to T₁ plants.

[0304] Tissue samples were collected in 96-well collection plates and lyophilized for 2 days. Tissue maceration was performed with a Kleco tissue pulverizer and tungsten beads (Kleco, Visalia, Calif.). Following tissue maceration the genomic DNA was isolated in high throughput format using the DNeasy 96 Plant kit (Qiagen, Germantown, Md.) according to the manufacturer's suggested protocol.

[0305] gDNA was quantified by Quant-IT Pico Green DNA assay kit (Molecular Probes, Invitrogen, Carlsbad, Calif.). Quantified gDNA was adjusted to 10 ng/μl for the Invader® assay or to 2 ng/μl for the hydrolysis probe assay using a Biorobot3000 automated liquid handler (Qiagen, Germantown, Md.).

[0306] Custom INVADER® assays were developed for pat analysis within canola by Third Wave Technologies (Madison, Wis.). The gDNA samples (7.5 μl of 10 ng/μl gDNA) were first denatured in 96-well plate format by incubation at 95° C. for 10 minutes and then cooled to ambient temperature. Next, 7.5 μl of master mix (3 μl of probe mix for pat and the HMG internal reference gene (Weng, 2005) Weng H. et al., (2005). J. AOAC Int. 88(2):577-84., 3.5 μl Cleavase XI FRET mix, and 1 μl of Cleavase XI Enzyme/MgCl₂ solution) were added to each well and the samples were overlayed with mineral oil. Plates were sealed and incubated at 63° C. for 1 hour in a BioRad Tetrad thermocycler. Plates were cooled to ambient temperature before being read on a fluorescence plate reader. All plates contained 1 copy, 2 copy and 4 copy standards as well as wild type control samples and blank wells containing no sample.

[0307] Readings were collected for both FAM (λ 485-528 nm) and RED (λ 560-620 nm) channels and from these the fold over zero (i.e., background) for each channel was determined for each sample by the sample raw signal divided by no template raw signal. From this data a standard curve was constructed and the best fit determined by linear regression analysis. Using the parameters identified from this fit, the apparent pat copy number was then estimated for each sample.

[0308] Transgene copy number determination by hydrolysis probe assay, analogous to TAQMAN® assay, was performed by real-time PCR using the LIGHTCYCLER®480 system (Roche Applied Science, Indianapolis, Ind.). Assays were designed for pat and the internal reference gene HMG using LIGHTCYCLER® Probe Design Software 2.0. For amplification, LIGHTCYCLER®480 Probes Master mix (Roche Applied Science, Indianapolis, Ind.) was prepared at 1× final concentration in a 10 μL volume multiplex reaction containing 0.4 μM of each primer and 0.2 μM of each probe (Table 8). A two-step amplification reaction was performed with an extension at 60° C. for 35 seconds with fluorescence acquisition. All samples were run in triplicate and the averaged Cycle threshold (Ct) values were used for analysis of each sample.

[0309] Analysis of real time PCR data was performed using LIGHTCYCLER® software release 1.5 using the relative quant module and is based on the ΔΔCt method. For this, a sample of gDNA from a single copy calibrator and known 2 copy check were included in each run (identical to those used for Invader assays above).

[0310] The presence of the other gene expression cassettes contained in the T₀ plant events was detected by individual PCR reactions. Primer pairs (Table 9) specific to the coding regions of these five PTU's were used for detection.

TABLE 9
Primer and probe information for hydrolysis probe assay of pat
and internal reference (HMG)

| Primer Name | Sequence | Detection |
|---|---|---|
| TQPATS | SEQ ID NO: 12; 5′ | |
| | ACAAGAGTGGATTGATGATCTAGAGAGGT 3′ | |
| TQPATA | SEQ ID NO: 13; 5′ | |
| | CTTTGATGCCTATGTGACACGTAAACAGT 3′ | |
| TQPATFQ | SEQ ID NO: 14; 5′ CY5- | Cy5 |
| | GGTGTTGTGGCTGGTATTGCTTACGCTGG-BHQ2 3′ | |
| HMGF | SEQ ID NO: 15; 5′ | |
| | CCTCTCTACCACCGTCTCACATG 3′ | |
| HMGR | SEQ ID NO: 16; 5′ | |
| | GATCTGGCCGGACTGTTTCA 3′ | |
| HMG-HEX | SEQ ID NO: 17; 5′ | Hex |
| | CGCTCCTCAGCTACCACCTCAACCA-IB 3′ | |

[0311] The PUFA synthase OrfA PCR reactions required two separate PCR reactions and different conditions (e.g., PCR primers and cycling conditions) to amplify the open reading frame of the gene sequence. All of the PCR reactions were completed using the conditions described in Table 10 with 35 cycles using the EX-TAQ PCR kit (TaKaRa Biotechnology Inc. Otsu, Shiga, Japan) per manufacturer's instructions. PCR products were resolved and identified using TAE agarose gel electrophoresis. The expected gel fragment sizes for the PCR products which would indicate the presence of a full length PTU are described in Table 10 in the “Expected sizes” column.

TABLE 10
PCR primers and conditions.
1st Half of Orf A Primers

| pDAB7361 | | | | |
|---|---|---|---|---|
| Conditions | Sequence | Expected sizes | Conditions | |
| MKS480 SEQ ID NO: 18 | CGAGTTCGGACTCAACATGTTCCA | 2524 bp | 94° C. | 3′ |
| MAS554 SEQ ID NO: 19 | AAGGTTGACGCCAGCGACAACGAG | | 94° C. | 30″ |
| | | | 60° C. | 30″ |
| | | | 72° C. | 2′30″ |
| | | | 72° C. | 10′ |
| | | | 4° C. | ∞ |
| pDAB7362 and | | | | |
| pDAB7363 | Sequence | Expected sizes | Conditions | |
| MAS547 SEQ ID NO: 20 | AAGTTTGGAGTTGGCTTCTGCAGC | 2833 bP | 94° C. | 3 |
| MAS581 SEQ ID NO: 21 | TGAGTTTGGTCTCAACATGTTCCA | | 94° C. | 30″ |
| | | | 60° C. | 30″ |
| | | | 72° C. | 2′30″ |
| | | | 72° C. | 10′ |
| | | | 4° C. | ∞ |

2nd Half of Orf A Primer

| pDA37361 | Sequence | Expected sizes | Conditions | |
|---|---|---|---|---|
| MAS556 SEQ ID NO: 22 | GATGCACGCCAAGGTGGTTGACAT | 2246 bp | 94° C. | 3′ |
| MAS481 SEQ ID NO: 23 | TAATGTAGAAGGGCTTGTCCTGCG | | 94° C. | 30″ |
| | | | 60° C. | 30″ |
| | | | 72° C. | 2′ |
| | | | 72° C. | 10′ |
| | | | 4° C. | ∞ |
| pDAB7362 and | | | | |
| pDAB7363 | Sequence | Expected sizes | Conditions | |
| MAS550 SEQ ID NO: 24 | GATGCACGCAAAGGTGGTTGACAT | 2246 bp | 94° C. | 3′ |
| MAS572 SEQ ID NO: 25 | TGATGTAGAAGGGTTTGTCTTGTG | | 94° C. | 30″ |
| | | | 60° C. | 30″ |
| | | | 72° C. | 2′ |
| | | | 72° C. | 10′ |
| | | | 4° C. | ∞ |

Orf B Primers

| pDAB7361, pDAB7362, | | | | |
|---|---|---|---|---|
| & pDAB7363 | Sequence | Expected sizes | Conditions | |
| MAS482 SEQ ID NO: 26 | CATGAGATGCATGACGAGAAGAGG | 5476 bp | 94° C. | 3′ |
| MAS483 SEQ ID NO: 27 | TGGCAACTTGGTTCACTGTTCCAG | | 94° C. | 30″ |
| | | | 60° C. | 30″ |
| | | | 72° C. | 5′ |
| | | | 72° C. | 10′ |
| | | | 4° C. | ∞ |

Chimeric Orf C Primers

| pDAB7361, pDAB7362, | | | | |
|---|---|---|---|---|
| &p DAB7363 | Sequence | Expected sizes | Conditions | |
| MAS488 SEQ ID NO: 28 | CGCTTCGTGTCAAGACCAACAAGA | 4354 bp | 94° C. | 3′ |
| MAS489 SEQ ID NO: 29 | GCACCACGCAAAATCTGAAGGTTG | | 94° C. | 30″ |
| | | | 60° C. | 30″ |
| | | | 72° C. | 5′ |
| | | | 72° C. | 10′ |
| | | | 4° C. | ∞ |

Acs-2 Primers

| pDAB7361, pDAB7362, | | | | |
|---|---|---|---|---|
| & pDAB7363 | Sequence | Expected sizes | Conditions | |
| MAS496 SEQ ID NO: 30 | GAACTTCTCTGAAACTGGTGTGGG | 1827 bp | 94° C. | 3′ |
| MAS497 SEQ ID NO: 31 | TCACAGGCATCCTCAATGGTCTCA | | 94° C. | 30″ |
| | | | 60° C. | 30″ |
| | | | 72° C. | 1′30″ |
| | | | 72° C. | 10′ |
| | | | 4° C. | ∞ |

Heti Primers

| pDAB7361, pDAB7362, | | | | |
|---|---|---|---|---|
| & pDAB7363 | Sequence | Expected sizes | Conditions | |
| MAS500 SEQ ID NO: 32 | TCAGATGAGGTTCATCTCTGGAGG | 576 bp | 94° C. | 3′ |
| MAS501 SEQ ID NO: 33 | ATCTGGCACAAGCTCCAACAGAGA | | 94° C. | 30″ |
| | | | 60° C. | 30″ |
| | | | 72° C. | 30″ |
| | | | 72° C. | 10′ |
| | | | 4° C. | ∞ |

[0312] A total of 197 canola events were identified as pat positive from the Invader and hydrolysis probe experiments. Fifteen of these events produced PCR amplicons for all five of the gene expression cassettes (PUFA synthase OrfA, PUFA synthase OrfB, PUFA synthase chimeric OrfC, acyl-CoA synthetase and 4′ phosphopantetheinyl transferase HetI) that were contained within the binary used to transform the plants. Table 11 provides the fifteen events which were further analyzed from the production of docosahexaenoic acid (DHA). These T₀ canola plants were grown to maturity in the greenhouse and were subsequently self-fertilized. The mature T₁ seed was harvested and analyzed for the DHA via GC-FAME analysis.

TABLE 11
PCR detection of docosahexaenoic acid (DHA) producing genes in transgenic canola
plants.

| | | Copy | PCR Reactions | | | | |
|---|---|---|---|---|---|---|---|
| Plasmid Name | Event Name | Number | ORFA | ORFB | ORFC | SzACS-2 | HetI |
| pDAB7361 | 5197[13]- | 1.3 | − | − | + | + | + |
| | 010.001 | | | | | | |
| | 5197[14]- | 1 | + | + | + | + | + |
| | 032.002 | | | | | | |
| | 5197[21]- | 4.3 | + | + | + | + | + |
| | 052.001 | | | | | | |
| | 5197[21]- | 4.6 | + | + | + | + | + |
| | 053.001 | | | | | | |
| | 5197[23]- | 8.2 | + | + | + | + | + |
| | 054.001 | | | | | | |
| pDAB7362 | 5217[6]- | 2.5 | + | + | + | + | + |
| | 058.001 | | | | | | |
| | 5217[6]- | 1.1 | + | + | + | + | + |
| | 065.002 | | | | | | |
| | 5217[1]- | 3.1 | + | + | + | + | + |
| | 021.001 | | | | | | |
| | 5217[4]- | 2.0 | + | + | + | + | + |
| | 011.001 | | | | | | |
| | 5217[2]- | 1.2 | + | + | + | + | + |
| | 038.001 | | | | | | |
| | 5217[2]- | 5.4 | + | + | + | + | + |
| | 039.001 | | | | | | |
| | 5217[6]- | 6.0 | + | + | + | + | + |
| | 055.001 | | | | | | |
| | 5217[6]- | 2.2 | + | + | + | + | + |
| | 057.001 | | | | | | |
| pDAB7363 | 5222[1]- | 6.3 | + | + | + | + | + |
| | 026.001 | | | | | | |
| | 5222[1]- | 1.7 | + | + | + | + | + |
| | 004.001 | | | | | | |
| | 5222[7]- | 2.6 | + | + | + | + | + |
| | 029.002 | | | | | | |

### Example 6

### Detection of DHA in Transgenic Canola Seed Lipids

[0313] Canola seed samples (either single seeds or bulked samples) were homogenized in heptane containing triheptadecanoin (Nu-Chek prep) as a triacylglycerol internal standard, using steel ball mill. Prior to homogenization, a solution of 0.25 M of freshly prepared sodium methoxide (Sigma-Aldrich, St. Louis, Mo.) in methanol was added. Extraction was conducted at 40° C. with constant shaking. Recoveries were verified by the recovery of the methylated surrogate C17 fatty acid. Extraction of FAMEs (fatty-acid methyl esters) was repeated three times and the heptane layers were pooled prior to analysis. The completeness of the reaction was verified by checking for the presence of endogenous FAMEs in a fourth extraction/derivatization. The resulting FAMEs were analyzed by GC-FID using a capillary column BPX 70 from SGE (15 m×0.25 mm×0.25 μM). Each FAME was identified by retention time and quantified by the injection of a rapeseed oil reference mix from Matreya LLC (Pleasant Gap, Pa.) as a calibration standard with addition of appropriate long chain polyunsaturated fatty acids (Nu-Chek Prep, Elysian Minn.).

[0314] FAMEs extract corresponding to seeds from seven events were found to contain peaks corresponding to DHA and DPA (n-6) following the GC-FAME analyses of T₁ seed (tabulated below in Table 12). Table 12 shows that the number of DHA-containing seeds varies (as expected from segregation of various copies of the transgene set inserted into the canola genome), as does the maximum content of DHA observed in the single seeds.

TABLE 12
LC-PUFA content of T1 seed from seven transgenic canola events containing genes
for the PUFA synthase genes, SzACS-2 and HetI.

| | | | Number | | | | | |
|---|---|---|---|---|---|---|---|---|
| | | | of DHA | Avg | | Avg | Avg | Highest |
| Plasmid | Event | PAT | positive | DHA | Avg DPA | Total | n-3/ | DHA |
| (pDAB) | Name | Copy # | seeds¹ | content² | content² | PUFA³ | PUFA⁴ | content⁵ |
| 7361 | 5197[13]- | 1.3 | 75/96 | 0.36 | 0.15 | 0.51 | 70% | 0.81 |
| | 010.001 | | | | | | | |
| 7361 | 5197[14]- | 1 | 67/96 | 0.43 | 0.12 | 0.55 | 78% | 1.05 |
| | 032.002 | | | | | | | |
| 7361 | 5197[21]- | 4.3 | 5/24 | 0.02 | 0.01 | 0.03 | 81% | 0.05 |
| | 052.001 | | | | | | | |
| 7361 | 5197[21]- | 4.6 | 32/48 | 0.07 | 0.03 | 0.11 | 64% | 0.22 |
| | 053.001 | | | | | | | |
| 7362 | 5217[6]- | 2.5 | 13/48 | 0.36 | 0.23 | 0.61 | 60% | 1.02 |
| | 058.001 | | | | | | | |
| 7362 | 5217[6]- | 1.1 | 16/48 | 0.15 | 0.09 | 0.25 | 61% | 0.23 |
| | 065.002 | | | | | | | |
| 7363 | 5222[1]- | 6.3 | 46/48 | 0.09 | 0.05 | 0.16 | 59% | 0.40 |
| | 026.001 | | | | | | | |

a. Number of seeds that contained detectable DHA/total number of seeds analyzed from the T1 bulk.
b. Average DHA content (% of total lipids) of all the DHA-positive seeds.
c. Average PUFA content (% of total lipids) of all the DHA-positive seeds.
d. Average % ratio of DHAn-3/total LC-PUFA (DHA + DPAn-6).
e. Highest DHA content observed in a single seed.

[0315] The developing seed from an additional event was analyzed and found to contain DHA but the mature plant yielded insufficient T₁ seed for further analysis. The long chain polyunsaturated fatty acids (LC-PUFA) peak identities were confirmed by mass spectrometry analysis and compared with authentic standards (Nu-Chek Prep, Elysian Minn.).

[0316] The single seed analysis for DHA content of T₁ seeds from one event (Event 5197[14]-032.002) is shown in FIG. 5. Single seeds contained up to 1% DHA (as % of total FAMEs). The DHA levels appear to segregate into three classes (0, ˜0.4% and ˜0.9% DHA) reflecting segregation of a single locus containing the DHA-producing genes.

[0317] These data indicate that DHA was produced in plants transformed with plasmids pDAB7361, pDAB7362 and pDAB7363. The pDAB7362 plasmid contains plant-optimized versions of all five genes (encoding PUFA synthase OrfA, PUFA synthase OrfB, PUFA synthase chimeric OrfC, acyl-CoA synthetase and 4′ phosphopantetheinyl transferase HetI) driven by the Phaseolus vulgaris phytohemagglutinin-L gene promoter. In pDAB7361, a native gene sequence of PUFA synthase OrfA (SzOrfA v2) replaces the plant-optimized version (SzOrfA v3). pDAB7363 is also similar to pDAB7362 except that a Arabidopsis thaliana Ribulose Bisphosphate Carboxylase small chain 1A chloroplast transit peptide is added to the N-terminus of PUFA synthase OrfA, PUFA synthase OrfB, PUFA synthase chimeric OrfC, and 4′ phosphopantetheinyl transferase HetI to target these polypeptides to the plastid.

### Example 7

### Detection of PUFA Synthase Proteins in Canola Seed

[0318] PUFA synthase polypeptides were detected in mature transgenic seed samples by Western blot. Seed was prepared for analysis by cracking dry seed with 2 stainless steel beads in a Kleco Bead Beater (Garcia Machine, Visalia, Calif.). Extraction buffer was added (50 mM Tris, 10 mM EDTA, 2% SDS) and sample tubes were rocked gently for 30 minutes. Samples were centrifuged for 30 minutes at 3000 rcf. The supernatant was collected and used for analysis. The amount of total soluble protein in the seed extract was determined by Lowry assay (BioRad, Hercules, Calif.). Samples were normalized to 1.55 mg/ml total soluble protein and prepared in LDS sample buffer (Invitrogen, Carlsbad, Calif.) with 40 mM DTT for a normalized load of 20 μg total soluble protein per lane. Samples were electrophoresed in 3-8% Tris acetate gels (Invitrogen, Carlsbad, Calif.) and transferred to nitrocellulose membranes. Blots were blocked in blocking buffer and probed with antibodies against the different PUFA synthase OrfA, OrfB and OrfC polypeptides. The Rabbit anti-A2-A which is directed against the A2 region of Schizochytrium PUFA Synthase subunit A (SzPUFS-A) and the Rabbit anti-B3-A which is directed against the B3 region of Schizochytrium PUFA Synthase subunit B (SzPUFS-B) were used. Region B3 is the Enoyl Reductase (ER) region. There is also an ER region in subunit C, so this antiserum will recognize both subunits B and C on a western blot. An anti-rabbit fluorescent labeled secondary antibody (Goat Anti-Rabbit AF 633 (Invitrogen, Carlsbad, Calif.)) was used for detection. Blots were visualized on a Typhoon Trio Plus fluorescent imager (GE Healthcare, New Brunswick N.J.).

[0319] SDS-PAGE western blots of extracts from late stage (>30 DAP) developing T1 seed from event 5197[14]-032.002 showed bands at the appropriate size when probed with Orf A, Orf B and Orf C specific antisera (FIG. 6). These bands could also be seen by direct staining with Coomassie Blue. Orf A, Orf B and Orf C have also been detecting in seed samples from DHA producing events 5197[13]-010.001, 5197[21]-052.001, 5197[21]-053.001 and 5217[6]-065.002.

[0320] A set of developing T2 seed samples collected 15, 20, 25, 30, 35, and 42 days after pollination (DAP) from DHA-producing canola event 5197[14]-032.002.Sx002 were analyzed for lipid content (FIG. 7a) and the presence of the OrfA, OrfB and OrfC polypeptides by western blot (FIG. 7b).

[0321] Expression of all three polypeptides was detected in developing seed at 30 and 35 days after pollination, and prominently detected at 42 days after pollination and in the mature seed (FIGS. 7a and 7b).

### Example 8

### DHA, DPA and EPA Levels in T₂ Canola Seeds

[0322] T₁ seeds from Event 5197[14]-032.002 were planted in the greenhouse and leaf samples were taken from 96 plants at the 4-5 leaf stage for DNA analysis to determine the number of copies of the transgene in each T₁ segregant plant. This was performed by Hydrolysis probe assays of the pat gene, using the protocol described above, and identified three distinct classes of segregants; 21 homozygous, 45 heterozygous and 30 null plants. All of the homozygous and 31 null plants were grown to maturity in the greenhouse and the seed harvested. Average T₂ seed yield per plant from the homozygous and null plants were 7.36 gm and 8.61 gm respectively.

[0323] The long-chain polyunsaturated fatty acids (LC-PUFA) content of T₂ seeds from the greenhouse-grown T₁ plants of Event 5197[14]-032.002 were determined in bulk extractions of 8-12 seeds by GC-FAME analysis, as previously described. 21 null segregant plants were also grown to maturity as controls. The LC-PUFA content of the homozygous plants is shown in FIG. 8. No LC-PUFAs were detected in seeds from any of the null segregants. Twenty of the transgenic lines produced between 0.28% and 0.90% DHA in the bulk seed analyses and one line failed to produce any LC-PUFA. The DHA-containing seeds also contained between 0.09 and 0.34% DPA (n-6). The average proportion of DHA in total PUFA (DHA+DPA) was 77%.

[0324] The fatty acid composition of seed from four lines producing over 0.7% DHA is shown in Table 13 in comparison with that from four null segregant lines

TABLE 13
Fatty acid composition of bulk T2 seeds from four transgenic lines and four null segregants from
Event 5197[14]-032.002.

| Line ID | Zygosity | C14:0 | C16:0 | C16:1 | C18:0 | C18:1 | C18:2 | C18:3 |
|---|---|---|---|---|---|---|---|---|
| 5197-[14]- | HOMO | 0.05 | 3.49 | 0.24 | 1.69 | 76.33 | 10.87 | 3.80 |
| 032.002.Sx002.012 | | | | | | | | |
| 5197-[14]- | HOMO | 0.07 | 3.50 | 0.24 | 1.67 | 76.10 | 11.39 | 3.63 |
| 032.002.Sx002.093 | | | | | | | | |
| 5197-[14]- | HOMO | 0.05 | 3.43 | 0.24 | 1.87 | 77.73 | 9.72 | 3.48 |
| 032.002.Sx002.050 | | | | | | | | |
| 5197-[14]- | HOMO | 0.06 | 3.48 | 0.24 | 1.70 | 75.53 | 11.63 | 3.73 |
| 032.002.Sx002.010 | | | | | | | | |
| 5197-[14]- | NULL | 0.06 | 3.59 | 0.23 | 1.68 | 76.56 | 12.08 | 3.24 |
| 032.002.Sx002.011 | | | | | | | | |
| 5197-[14]- | NULL | 0.06 | 3.63 | 0.25 | 1.60 | 76.28 | 12.21 | 3.33 |
| 032.002.Sx002.032 | | | | | | | | |
| 5197-[14]- | NULL | 0.05 | 3.74 | 0.25 | 1.61 | 77.46 | 10.78 | 3.35 |
| 032.002.Sx002.037 | | | | | | | | |
| 5197-[14]- | NULL | 0.06 | 3.61 | 0.24 | 1.61 | 75.83 | 12.54 | 3.67 |
| 032.002.Sx002.048 | | | | | | | | |
| Line ID | Zygosity | C20:0 | C20:1 | C22:0 | C22:1 | C24:0 | C22:5 | C22:6 |
| 5197-[14]- | HOMO | 0.67 | 1.25 | 0.39 | 0.02 | 0.18 | 0.28 | 0.74 |
| 032.002.Sx002.012 | | | | | | | | |
| 5197-[14]- | HOMO | 0.60 | 1.21 | 0.33 | 0.02 | 0.16 | 0.32 | 0.77 |
| 032.002.Sx002.093 | | | | | | | | |
| 5197-[14]- | HOMO | 0.70 | 1.18 | 0.39 | 0.02 | 0.19 | 0.20 | 0.80 |
| 032.002.Sx002.050 | | | | | | | | |
| 5197-[14]- | HOMO | 0.62 | 1.22 | 0.36 | 0.02 | 0.16 | 0.34 | 0.90 |
| 032.002.Sx002.010 | | | | | | | | |
| 5197-[14]- | NULL | 0.68 | 1.29 | 0.37 | 0.03 | 0.20 | 0.00 | 0.00 |
| 032.002.Sx002.011 | | | | | | | | |
| 5197-[14]- | NULL | 0.67 | 1.31 | 0.40 | 0.03 | 0.23 | 0.00 | 0.00 |
| 032.002.Sx002.032 | | | | | | | | |
| 5197-[14]- | NULL | 0.70 | 1.37 | 0.42 | 0.01 | 0.26 | 0.00 | 0.00 |
| 032.002.Sx002.037 | | | | | | | | |
| 5197-[14]- | NULL | 0.64 | 1.24 | 0.35 | 0.01 | 0.19 | 0.00 | 0.00 |
| 032.002.Sx002.048 | | | | | | | | |

[0325] Single seed analysis of 48 T₂ seeds from six lines of these homozygous T₁ plants (4, 35, 63, 96, 50, and 106) was performed. Detailed analysis of the GC-FAME profile showed that an additional peak was consistently present in seeds containing DHA and DPA. This was identified as C20:5(n-3) EPA by comparison with an authentic standard (NU-Chek). The retention time matched that for authentic EPA (C20:5 (n-3)) and the nomimal molecular mass determined by GC-MS via the PoiarisQ was identical.

[0326] A summary of the LC-PUFA of the single T₂ seed analyses: from the six lines is Shown in FIG. 9. Single seeds with DHA content up to 1.6% were found. In addition plants with EPA content up to 0.27% were identified.

[0327] Reciprocal crosses were made between two T₁ lines and untransformed Nexera710. The resulting parent and H hybrid seeds were analyzed for DHA content (FIG. 10). In FIG. 10, diamonds represent the mean ANOVA for each category described on the X axis. The vertical bar represents the mean for the category and the distance between the extreme of the diamond is the 95% confidence interval. The average level of DHA accumulation in F1 seed (0.29% and 0.28%) is half of what the transgenic parent seed are accumulating (0.51% and 0.47%). A quantitative correlation of the phenotype and zygosity level can be deduced from this result.

[0328] In summary, these data show that the DHA trait conferred by the five transgenes is heritable and is maintained into a second generation.

### Example 9

### DHA Production in Canola Event-10 T2 seed

[0329] Sixty T₁ seeds from canola event 5197[13]-010.001 (containing two copies of the pat gene as shown in FIG. 11) were planted in the greenhouse. Hydrolysis probe assays of the pat gene identified five distinct classes of segregants corresponding to 0-4 copies of the pat gene.

[0330] The two loci corresponding to the transgenic inserts could be distinguished by Southern blot analysis (denoted locus A and B). DNA from all of the plants containing two pat copies were analyzed by Southern blot to determine their genotype (homozygous for locus A or locus B, or hemizygous for both loci). Four single copy and two null control plants were also analyzed as controls. All of the T₁ plants were grown to maturity in the greenhouse. The seed was harvested and analyzed in bulk seed analyses for LC-PUFA content (Table 14).

TABLE 14
LC-PUFA content of T₂ seeds from T₁ segregants from Event
5197[13]-010.001 (Means were compared by Tukey-Kramer HSD Test
and levels not connected with same latter are significantly different.)

| | | | Average | | |
|---|---|---|---|---|---|
| | | | LC- | | |
| | | | PUFA | | |
| | PAT | # of T1 | Content | | |
| | Copy | plants | % total | | Statistical |
| Genotype | # | analyzed | FAMEs | SE | Significance |
| Null | 0 | 5 | 0.00 | 0.07 | d |
| Hemizygous at | 1 | 2 | 0.47 | 0.11 | ab |
| locus A | | | | | |
| Hemizygous at | 1 | 2 | 0.02 | 0.11 | bcd |
| locus B | | | | | |
| Hemizygous at locus | 2 | 13 | 0.15 | 0.04 | bcd |
| A & B | | | | | |
| Homozygous at | 2 | 4 | 0.65 | 0.08 | a |
| locus A | | | | | |
| Homozygous at | 2 | 5 | 0.00 | 0.07 | cd |
| locus B | | | | | |
| Homozygous at one | 3 | 13 | 0.03 | 0.04 | d |
| locus, hemizygous | | | | | |
| at the other | | | | | |
| Homozygous Locus | 4 | 5 | 0.00 | 0.07 | d |
| A & B | | | | | |

[0331] These data show that plants that are homozygous at Event 5197[13]-010.001 locus A direct the production of LC-PUFA whereas locus B homozygotes do not. Furthermore locus B interferes with LC-PUFA production as four-copy double homozygotes produce very low levels of DHA as do the three-copy plants. Similarly hemizygous single-copy locus A plants produce 0.47% LC-PUFA, whereas hemizygous single-copy locus B produce very low levels of LC-PUFA (0.02%).

[0332] The complete fatty composition determined by GC-FAME analysis of the bulk T2 seed from plants derived from event Event 5197[13]-010.001 that were homozygous at locus A (and null for locus B) is shown in Table 15.

TABLE 15
Fatty acid composition of T₂ seed from event Event 5197[13]-010.001 homozygous at locus A

| Line ID | C14:0 | C16:0 | C16:1 | C18:0 | C18:1 | C18:2 | C18:3 | C20:0 |
|---|---|---|---|---|---|---|---|---|
| 5197 [13]- | 0.05 | 3.46 | 0.23 | 0.57 | 79.40 | 10.23 | 3.09 | 0.65 |
| 010.Sx001.008 | | | | | | | | |
| 5197 [13]- | 0.05 | 3.53 | 0.25 | 1.42 | 78.36 | 10.57 | 3.17 | 0.61 |
| 010.Sx001.015 | | | | | | | | |
| 5197 [13]- | 0.05 | 3.60 | 0.24 | 1.72 | 77.40 | 10.73 | 3.15 | 0.59 |
| 010.Sx001.050 | | | | | | | | |
| 5197 [13]- | 0.05 | 3.63 | 0.26 | 1.48 | 78.41 | 10.32 | 3.01 | 0.58 |
| 010.Sx001.051 | | | | | | | | |

| Line ID | C20:1 | C22:0 | C22:1 | C20:5 | C24:0 | C22:5 | C22:6 |
|---|---|---|---|---|---|---|---|
| 5197 [13]- | 1.28 | 0.38 | 0.02 | 0.04 | 0.20 | 0.12 | 0.28 |
| 010.Sx001.008 | | | | | | | |
| 5197 [13]- | 1.07 | 0.32 | 0.02 | 0.04 | 0.16 | 0.12 | 0.31 |
| 010.Sx001.015 | | | | | | | |
| 5197 [13]- | 0.99 | 0.28 | 0.03 | 0.05 | 0.13 | 0.33 | 0.70 |
| 010.Sx001.050 | | | | | | | |
| 5197 [13]- | 1.11 | 0.34 | 0.02 | 0.04 | 0.15 | 0.18 | 0.41 |
| 010.Sx001.051 | | | | | | | |

### Example 10

### Field Production of DHA in Canola

[0333] The T₂ seed from ten homozygous lines of 5197[14]-032.002 that contained the highest levels of DHA were pooled to yield 60 gm of seed. Seed was also pooled from 10 null segregant lines to give 47 gm of seed for use as a negative control. The seed was planted at two locations in North Dakota in May 2009 with 8 plots of the transgene-containing seed, 6 plots of null segregant seed and two plots of a commercial control (Nexera 845CL) at each location. All of the transgenic plant plots and four of the null segregant plots were covered with isolation cages during flowering. The remaining two null plots and the Nexera 845CL plots were left uncovered. The plots were swathed and harvested in September according to normal practices. At Site 1, a plot average of 0.95 kg of seed was obtained from transgenic plants and 0.99 kg from the null plants. At Site 2, plot averages were 0.64 kg from transgenic plants and 0.73 kg from nulls. GC-FAME lipid analysis of seed from each plot was performed to determine the levels of LC-PUFAs in the field-grown seed (Table 16).

TABLE 16
T3 seed DHA content by 10-seed bulk analysis from field-grown T₂ plants
of 5197[14]-032.002.

| | | Average DHA | |
|---|---|---|---|
| | | content (% total | Average LC-PUFA content |
| Site | Plot | FAMEs) | (% Total FAMEs) |
| Site 1 | 1-11 (homo) | 0.01% | 0.02% |
| Site 1 | 1-12 (homo) | 0.18% | 0.27% |
| Site 1 | 1-17 (homo) | 0.13% | 0.19% |
| Site 1 | 1-18 (homo) | 0.21% | 0.33% |
| Site 1 | 1-21 (homo) | 0.17% | 0.26% |
| Site 1 | 1-23 (homo) | 0.21% | 0.32% |
| Site 1 | 1-27 (homo) | 0.30% | 0.44% |
| Site 1 | 1-28 (homo) | 0.15% | 0.23% |
| Site 1 | 1-13 (sib null) | 0.00% | 0.00% |
| Site 1 | 1-15 (sib null) | 0.00% | 0.00% |
| Site 1 | 1-16 (sib null) | 0.00% | 0.00% |
| Site 1 | 1-22 (sib null) | 0.00% | 0.00% |
| Site 1 | 1-24 (sib null) | 0.00% | 0.00% |
| Site 1 | 1-26 (sib null) | 0.00% | 0.00% |
| Site 1 | 1-25_Nexera845 | 0.00% | 0.00% |
| Site 2 | 2-11 (homo) | 0.24% | 0.37% |
| Site 2 | 2-13 (homo) | 0.19% | 0.27% |
| Site 2 | 2-17 (homo) | 0.23% | 0.36% |
| Site 2 | 2-18 (homo) | 0.32% | 0.48% |
| Site 2 | 2-21 (homo) | 0.38% | 0.56% |
| Site 2 | 2-23 (homo) | 0.27% | 0.41% |
| Site 2 | 2-26 (homo) | 0.33% | 0.47% |
| Site 2 | 2-28 (homo) | 0.16% | 0.24% |
| Site 2 | 2-12 (sib null) | 0.00% | 0.00% |
| Site 2 | 2-14 (sib null) | 0.00% | 0.00% |
| Site 2 | 2-16 (sib null) | 0.00% | 0.00% |
| Site 2 | 2-22 (sib null) | 0.00% | 0.00% |
| Site 2 | 2-25 (sib null) | 0.00% | 0.00% |
| Site 2 | 2-27 (sib null) | 0.00% | 0.00% |
| Site 2 | 2-15_Nexera845 | 0.00% | 0.00% |

[0334] The results from Table 16 represent an analysis of three samples from each plot. Seed from plot 1-11 contained lower levels of 18:1 (65.5%) and higher levels of 18:3 (7.6%) compared to other Site 1 plots (average 76.7% 18:1 and 2.9% 18:3), and was therefore considered to be extensively contaminated with conventional canola. This plot was excluded from subsequent analyses. The average DHA content by 10-seed bulk analyses of the T₃ seed from the transgenic plants from Site 1 was 0.19% and from Site 2 was 0.26%. The highest DHA content was 0.38% (with 0.03% EPA). The average % ratio of n-3 LC-PUFA/Total PUFAs was 73%.

[0335] Samples of each T₂ line used in the field trial were also grown in the greenhouse. The average DHA content by 10-seed bulk analyses of the T₃ greenhouse seed was 0.22% with individual plants having up to 0.8% DHA. This correlates with the amount of DHA produced in the field.

[0336] These data show that the subject PUFA synthase gene suite can direct production of DHA under field conditions.

### Example 11

### DHA Gene Expression Analysis Using Microarray Technology

[0337] Developing canola seeds were collected from a transgenic homozygous Event 5197[14]-032.002 line and untransformed null plants at 15, 20, 25, 30, 35 and 42 days after pollination (DAP). A single-color global gene expression profiling design was used to determine the levels of expression of each of the newly introduced genes into the homozygous transformed line in relation to the untransformed null line for each of the defined time points during seed development. Three identical technical replicates of individual 60-mer oligo arrays (Agilent Technologies Inc., Santa Clara, Calif.) were hybridized with amplified, Cy3 labeled cRNA from each sample. A custom designed (eArray, Agilent Technologies Inc., Santa Clara, Calif.) 60-mer comprehensive transcriptome-wide canola oligonucleotide array was used to carry out the hybridizations previously described. This array contains more than 37,000 different canola transcripts (Agilent Technologies Inc., Santa Clara, Calif.) obtained from public data sources. To efficiently measure the expression levels of each transcript, the oligos present in the array were designed to be unique and specific for each target to efficiently hybridize with the predicted target sequence. Oligos that form a duplex with more than one transcript were eliminated from the array. Each oligo also fulfills the chemical and physical properties required for optimal performance throughout microarray processing. In addition, specific and unique oligos representing the newly introduced genes as well as several other genes of interest are also represented in the custom designed canola oligo array. The 60-mer oligos were synthesized in-situ using the Sure-Print technology from the manufacturer.

### RNA Isolation and Purification

[0338] Samples of developing seeds from Event 5197[14]-032.002 and a null plant control were frozen and pooled to be used as starting material for RA isolation and purification. A total of 500 mgs of seed tissue per pooled sample were ground with liquid nitrogen using a mortar and pestle and approximately 50 mgs of the ground tissue were resuspended in 450 μl of extraction buffer RLT from the RNeasy Kit for RNA extraction (Qiagen, Valencia, Calif.). Samples were vortexed briefly to disrupt tissues before continuing with the extraction protocol. Total RNA was purified following the instructions from the RNeasy Kit for RNA extraction (Qiagen, Valencia, Calif.). Purified total RNA was then quantified using a NanoQuant (TECAN, Research Triangle Park, N.C.) spectrophotometer and visualized by standard 1% Agarose gel electrophoresis.

[0339] For labeling, a total of 1.0 μg of purified total RNA from each sample was reverse transcribed, amplified and labeled with Cy3-CTP following the Agilent (Santa Clara, Calif.) One-color microarray-based gene expression QuickAmp labeling protocol. Since each canola array contains more than 1300 internal spike-in controls a One-color RNA spike-in kit (Agilent, Santa Clara, Calif.) was also labeled according to manufacturer's instructions. Samples were reverse transcribed using MMLV Reverse Transcriptase and amplified using a T7 RNA Polymerase. After amplification cRNA was purified using Qiagen's RNeasy mini spin columns and quantified using a NanoQuant spectrophotometer (TECAN, Research Triangle Park, N.C.). Specific activity for Cy3 was determined by the following formula: (Concentration of Cy3/(Concentration of cRNA)*1000=pmol of Cy3 per μg of cRNA. Samples for hybridization were normalized to 1.65 μgs with a specific activity of >9.0 pmol of Cy3 per μg of cRNA.

### Hybridization, Scanning and Feature Extraction

[0340] Oligo gene expression arrays were hybridized using the Agilent Technologies (Santa Clara, Calif.) Gene Expression Hybridization kit and Wash Buffer kit. Hybridizations were carried out on a fully automated TECAN HS4800 PRO (TECAN, Research Triangle Park, N.C.) hybridization station. The hybridization mixture was injected at 65° C. and incubated with agitation for 17 hrs after following a slide pre-hybridization step at 65° C. for 30 seconds. Slides were then washed at 37° C. for 1 minute using the Agilent GE Wash #1 followed by a second wash at 30° C. with Agilent GE Wash #2 for 1 minute and a final drying step using Nitrogen gas for 2 minutes and 30 seconds at 30° C. Slides were scanned immediately to minimize impact of environmental oxidants on signal intensities.

[0341] Arrays were scanned using an Agilent G2565CA microarray scanner with SureScan high resolution technology (Agilent Technologies, Santa Clara, Calif.). The protocol for scanning each array defines parameters for dye channel, scan region and resolution, TIFF file dynamic range, PMT gain and the setting for the final image outcome. Once the array has been scanned a feature extraction (FE) protocol is followed, using parameters defined for placing and optimizing the grid fit, finding the spots, flagging outliers, computing background bias, error and ratios, and calculating quality control metrics. After scanning and feature extraction protocols are completed, a TIFF file containing the Cy3 image is generated along with a quality control metrics report and a final file (TXT) containing all the raw data. The image files (TIFF) were used to examine general quality of the slides, presence of spike-in controls in the right positions (four corners) and intensities, as well as to confirm that hybridization, washing, scanning and feature extraction processes were successful. The FE quality control (QC) report provided values of coefficient of variation allowing to measure dispersion of data based on positive and negative (prokaryotic genes and artificial sequences) spike-in controls provided and designed by Agilent Technologies (Santa Clara, Calif.). This report also provided information about data distribution, uniformity, background, reproducibility, sensitivity and general quality of data. The TXT file containing all the raw data was uploaded into GeneSpring (Agilent, Santa Clara, Calif.) for further analysis.

### Data Normalization and Statistical Analysis

[0342] After scanning and feature extraction, raw data files were uploaded into GeneSpring GX version 10.0.2 (Agilent Technologies, Santa Clara, Calif.) and a project was created defining each array data file as a sample and assigning the appropriate parameter values. Samples with the same parameter values were treated as replicates. Interpretations were created to specify how the samples were grouped into experimental conditions and were used to visualize and analyze data. Quality control on samples based on spike-in controls, parameters and interpretations previously defined, was performed to ensure quality of data before starting analysis and a quality control metrics report by GeneSpring was generated.

[0343] Data was normalized using a global percentile shift normalization method to minimize systematic non-biological differences and standardize arrays for cross comparisons. This algorithm transformed signal intensities to log base 2 and arranged them in increasing order, computing the rank of the 75^{th} percentile and subtracting this value from each of the log transformed signal intensities generating the normalized intensity value. Data was filtered by selecting entities that were flagged as Present in every single sample under study and eliminating entities flagged as Marginal or Absent. The filtered and normalized list of entities was used as input for statistical analysis using a Two Way ANOVA method with a corrected p-value cut-off of p<0.05 defining DAP and Genotype as parameters. The expression profile for each of the newly introduced genes was determined.

### Results

[0344] The values obtained for concentration of total RNA as well as labeled and amplified cRNA were optimal. Also the values for concentration after amplification, efficiency of labeling with Cy3 and specific activity required for consistent and reliable results were excellent. The quality control (QC) report provided by the feature extraction protocol for each individual array after scanning provided values of coefficient of variation that were used to measure dispersion of data based on positive and negative spike-in controls. All the values obtained from the reports showed optimal quality of data distribution, uniformity, background and sensitivity. The GeneSpring (Agilent Technologies, Santa Clara, Calif.) quality control metrics report on samples used during this study provided significant statistical values that assisted in the evaluation of reproducibility and reliability of the data obtained. The reported values for the groups of technically replicated arrays (3 per sample) were within range and indicated that the data obtained was reliable (Data not shown).

[0345] The raw values reported for each of the six time points defined during seed development for the homozygote (Table 17) (“DAP” represents days after pollination) and null (Table 18) lines represent the signal intensity values left after all the feature extraction (FE) processing steps have been completed including background subtraction and multiplicative detrending when necessary. Normalized values for homozygote (Table 19) and null (Table 20) lines on the other hand, have been processed using a global percentile shift normalization method that accounts for technical variation, minimizes systematic non-biological differences and standardizes arrays for cross comparisons.

TABLE 17
Raw intensity values of expression for each of the newly introduced genes in the homozygote Event 5197[14]-032.002.

| Oligo ID | Contig_ID | 15 DAP | 20 DAP | 25 DAP | 30 DAP | 35 DAP | 42 DAP |
|---|---|---|---|---|---|---|---|
| BnOL1037472 | SzPUFA_OrfA_v2 | 550.5884 | 1555.393 | 10616.878 | 55336.754 | 53827.918 | 168238.69 |
| BnOL1037031 | SzACS-2_v3 | 735.7014 | 7502.7305 | 53598.45 | 160619.44 | 125797.09 | 149734.28 |
| BnOL1037030 | hSzThPUFA_OrfC_v3 | 278.55338 | 6337.2075 | 41672.094 | 101111.23 | 65916.695 | 79815.85 |
| BnOL1037032 | NoHetl_v3 | 438.25513 | 2608.736 | 22412.197 | 84830.35 | 72039.04 | 81936.24 |
| BnOL1037029 | SzPUFA_OrfB_v3 | 20.972246 | 319.27515 | 3329.6416 | 8812.985 | 4742.8223 | 9504.665 |
| BnOL1037034 | PAT_v5 | 1433.2236 | 3672.4446 | 6221.7075 | 6744.2925 | 1784.8667 | 5964.65 |

TABLE 18
Raw intensity values of expression for each of the newly introduced genes in the null untransformed Omega-9 Nexera 710 line.

| Oligo ID | Contig_ID | 15 DAP | 20 DAP | 25 DAP | 30 DAP) | 35 DAP | 42 DAP |
|---|---|---|---|---|---|---|---|
| BnOL1037472 | SzPUFA_OrfA_v2 | 24.637857 | 13.909026 | 18.128113 | 17.591684 | 21.86625 | 22.927202 |
| BnOL1037031 | SzACS-2_v3 | 4.892006 | 1.9428447 | 4.488978 | 4.234072 | 33.388905 | 5.6000123 |
| BnOL1037030 | hSzThPUFA_OrfC_v3 | 19.027159 | 14.894593 | 24.208069 | 20.789322 | 20.698792 | 16.794432 |
| BnOL1037032 | NoHetl_v3 | 3.1428213 | 1.9340261 | 4.188954 | 3.1923647 | 17.189857 | 4.665717 |
| BnOL1037029 | SzPUFA_OrfB_v3 | 2.3353922 | 3.9272563 | 6.6409183 | 3.3479385 | 3.8365993 | 32.812595 |
| BnOL1037034 | PAT_v5 | 3.3936017 | 2.7436378 | 4.193728 | 35.491924 | 11.871919 | 27.160715 |

TABLE 19
Normalized intensity values of expression for each of the newly introduced genes in the homozygote
Event 5197[14]-032.002.

| Oligo ID | Contig_ID | 15 DAP | 20 DAP | 25 DAP | 30 DAP | 35 DAP | 42 DAP |
|---|---|---|---|---|---|---|---|
| BnOL1037472 | SzPUFA_OrfA_v2 | 1.7016697 | 3.3545377 | 6.0190024 | 8.880801 | 9.054455 | 11.272922 |
| BnOL1037031 | SzACS-2_v3 | 1.8789514 | 5.3857155 | 8.116115 | 10.176245 | 10.039913 | 10.870583 |
| BnOL1037030 | hSzThPUFA_OrfC_v3 | 1.4449383 | 6.1070085 | 8.718198 | 10.475076 | 10.072738 | 10.922383 |
| BnOL1037032 | NoHetl_v3 | 1.887683 | 4.618933 | 7.613214 | 10.01268 | 9.989469 | 10.756434 |
| BnOL1037029 | SzPUFA_OrfB_v3 | −0.7546156 | 3.3309612 | 6.6095963 | 8.492256 | 7.811666 | 9.391258 |
| BnOL1037034 | PAT_v5 | 1.9656178 | 3.4748821 | 4.1320724 | 4.72564 | 3.0201833 | 5.337647 |

TABLE 20
Normalized intensity values of expression for each of the newly introduced genes in the null untransformed
Omega-9 Nexera 710 line.

| Oligo ID | Contig_ID | 15 DAP | 20 DAP | 25 DAP | 30 DAP | 35 DAP | 42 DAP |
|---|---|---|---|---|---|---|---|
| BnOL1037472 | SzPUFA_OrfA_v2 | −2.6522558 | −3.253315 | −3.0071614 | −2.8780248 | −2.3888729 | −2.038585 |
| BnOL1037031 | SzACS-2_v3 | −5.3231525 | −6.39583 | −5.3554688 | −5.8499255 | −1.9909037 | −4.2954717 |
| BnOL1037030 | hSzThPUFA_OrfC_v3 | −2.3083773 | −2.42181 | −1.8761693 | −1.9263924 | −1.7606672 | −1.6746639 |
| BnOL1037032 | NoHetl_v3 | −5.2632127 | −5.647943 | −4.671536 | −5.151732 | −2.2263987 | −3.93217 |
| BnOL1037029 | SzPUFA_OrfB_v3 | −3.8752975 | −2.9589367 | −2.3685415 | −3.026766 | −2.905297 | 0.8310469 |
| BnOL1037034 | PAT_v5 | −6.7221875 | −6.835022 | −6.305078 | −3.753248 | −4.357948 | −2.8239324 |

[0346] The schematic representation of the raw (FIG. 12) and normalized (FIG. 13) values obtained for the null line at every time point during seed development confirm that these genes are not present in the Omega-9 Nexera 710 untransformed line and therefore significant expression is not detected. In the Event 5197[14]-032.002 line as shown in FIG. 14 (raw) and FIG. 15 (normalized), a general trend of increasing transcript accumulation of all genes as seed development progresses can be observed. The initial significant increase of transcript accumulation occurs during 15 and 30 DAP and reaches maximum levels at DAP 42. The raw curves showed in FIG. 14, provide a visualization of the relative hybridization intensity values obtained for each of the genes under study, while the normalized curves summarized in FIG. 15 represent the general trend of gene expression profiles with minimized systematic non-biological variation and standardized comparisons across arrays.

### Example 12

### Expression of the Algal PUFA Synthase Gene Suite Using Alternative Promoters

[0347] The use of additional transcriptional regulatory elements to express the gene(s) encoding PUFA synthase OrfA, PUFA synthase OrfB, PUFA synthase chimeric OrfC, acyl-CoA synthetase and 4′ phosphopantetheinyl transferase HetI proteins can further increase DHA content within canola. Identification and use of transcriptional regulatory elements which express earlier in development and for extended periods of time can increase the levels of DHA within canola seed by promoting transcription of a heterologous gene at earlier stages of seed development (e.g., at 15 to 25 DAP) and therefore extend the time of DHA production. Examples of such transcriptional regulatory regions include, but are not limited to, the LfKCS3 promoter (U.S. Pat. No. 7,253,337) and FAE 1 promoter (U.S. Pat. No. 6,784,342) and the ACP promoter (WO 1992/18634). These promoters are used singularly or in combination to drive the expression of the PUFA synthase OrfA, PUFA synthase OrfB, PUFA synthase chimeric OrfC, acyl-CoA synthetase and 4′ phosphopantetheinyl transferase HetI expression cassettes, which were previously described in the following plasmids; pDAB7361, pDAB7362, and pDAB7363. Methods to replace transcriptional regulatory regions within a plasmid are well known within the art. As such, a polynucleotide fragment comprising the PvDlec2 promoter v2 is removed from pDAB7361, pDAB7362, or pDAB7363 (or the preceding plasmids used to build pDAB7361, pDAB7362, or pDAB7363) and replaced with either LfKCS3 or the FAE 1 promoter regions. The newly constructed plasmids are used to stably transform canola plants. Transgenic canola plants are isolated and molecularly characterized. The resulting LC-PUFA accumulation is determined and canola plants which produce 0.01% to 15% DHA or 0.01% to 10% EPA are identified.

Construction of pDAB9166

[0348] The pDAB9166 plasmid (FIG. 26; SEQ ID NO:46) was constructed using a multi site Gateway L-R recombination reaction. pDAB9166 contains three PUFA synthase PTUs, one phosphopantetheinyl transferase PTU and a phosphinothricin acetyl transferase PTU. Specifically, the first PUFA synthase PTU contains the LfKCS3 promoter v1, SzPUFA OrfA v3 and AtuORF23 3′ UTR v1. The second PUFA synthase PTU contains the LfKCS3 promoter v1, SzPUFA OrfB v3 and AtuOrf23 3′ UTR v1. The third PUFA synthase PTU contains the LfKCS3 promoter v1, hSzThPUFA OrfC v3 and AtuORF23 3′ UTR v1. The phosphopantetheinyl transferase PTU contains the LfKCS3 promoter v1, NoHetI v3 and AtuORF23 3′ UTR v1.

[0349] Plasmids pDAB9161, pDAB9162, pDAB9163, pDAB101484 and pDAB7333 were recombined to form pDAB9166. Specifically, the four PTUs described above were placed in a head-to-tail orientation within the T-strand DNA border regions of the plant transformation binary pDAB7333. The order of the genes is: SzPUFA OrfA v3, SzPUFA OrfB v3, hSzThPUFA OrfC v3, NoHetI v3. pDAB7333 also contains the phosphinothricin acetyl transferase PTU: CsVMV promoter v2, PAT v5, AtuORF1 3′UTR v4 in addition to other regulatory elements such as Overdrive and T-stand border sequences (T-DNA Border A and T-DNA Border B). Recombinant plasmids containing the five PTUs were then isolated and tested for incorporation of the five PTUs with restriction enzyme digestion and DNA sequencing.

Construction of pDAB9167

[0350] The pDAB9167 plasmid (FIG. 27; SEQ ID NO:47) was constructed using a multi-site Gateway L-R recombination reaction. pDAB9167 contains three PUFA synthase PTUs, one phosphopantetheinyl transferase PTU and a phosphinothricin acetyl transferase PTU. Specifically, the first PUFA synthase PTU contains the LfKCS3 promoter v1, SzPUFA OrfA v3 and AtuORF23 3′ UTR v1. The second PUFA synthase PTU contains the BoACP promoter v1, BoACP 5′ UTR v1, SzPUFA OrfB v3 and AtuOrf23 3′ UTR v1. The third PUFA synthase PTU contains the LfKCS3 promoter v1, hSzThPUFA OrfC v3 and AtuORF23 3′ UTR v1. The phosphopantetheinyl transferase PTU contains the BoACP promoter v1, BoACP 5′ UTR v1, NoHetI v3 and AtuORF23 3′ UTR v1.

[0351] Plasmids pDAB9161, pDAB9165, pDAB9163, pDAB101485 and pDAB7333 were recombined to form pDAB9167. Specifically, the four PTUs described above were placed in a head-to-tail orientation within the T-strand DNA border regions of the plant transformation binary pDAB7333. The order of the genes is: SzPUFA OrfA v3, SzPUFA OrfB v3, hSzThPUFA OrfC v3, NoHetI v3. pDAB7333 also contains the phosphinothricin acetyl transferase PTU: CsVMV promoter v2, PAT v5, AtuORF1 3′UTR v4 in addition to other regulatory elements such as Overdrive and T-stand border sequences (T-DNA Border A and T-DNA Border B). Recombinant plasmids containing the five PTUs were then isolated and tested for incorporation of the five PTUs with restriction enzyme digestion and DNA sequencing.

Construction of pDAB7379

[0352] pDAB7379 is a binary plasmid that was constructed to contain rebuilt, codon optimized versions of SzPUFA OrfA, SzPUFA OrfB, hSzThPUFA OrfC, and NoHetI. The SzACS-2 gene sequence is not included in this construct. The pDAB7379 plasmid (FIG. 28; SEQ ID NO:48) was constructed using a multi-site Gateway L-R recombination reaction.

[0353] pDAB7379 contains three PUFA synthase PTUs, one phosphopantetheinyl transferase PTU and a phosphinothricin acetyl transferase PTU. Specifically, the first PUFA synthase PTU contains the PvPhas Promoter v3, PvPhas 5′ UTR, SzPUFA OrfA v3 and AtuORF23 3′ UTR v1. The second PUFA synthase PTU contains the PvPhas Promoter v3, PvPhas 5′ UTR, SzPUFA OrfB v3 and AtuORF23 3′ UTR v1. The third PUFA synthase PTU contains the PvPhas Promoter v3, PvPhas 5′ UTR, hSzThPUFA OrfC v3 and AtuORF23 3′ UTR v1. The phosphopantetheinyl transferase PTU contains the PvPhas Promoter v3, PvPhas 5′ UTR, NoHetI v3 and AtuORF23 3′ UTR v1.

[0354] Plasmids pDAB7371, pDAB7372, pDAB7373, pDAB7374 and pDAB7333 were recombined to form pDAB7379. Specifically, the four PTUs described above were placed in a head-to-tail orientation within the T-strand DNA border regions of the plant transformation binary pDAB7333. The order of the genes is: SzPUFA OrfA v3, SzPUFA OrfB v3, hSzThPUFA OrfC v3, NoHetI v3. pDAB7333 also contains the phosphinothricin acetyl transferase PTU: CsVMV promoter v2, PAT v5, AtuORF1 3′UTR v4 in addition to other regulatory elements such as Overdrive and T-stand border sequences (T-DNA Border A and T-DNA Border B). Recombinant plasmids containing the five PTUs were then isolated and tested for incorporation of the five PTUs with restriction enzyme digestion and DNA sequencing.

Construction of pDAB7380

[0355] pDAB7380 is a binary plasmid that was constructed to contain rebuilt, codon optimized versions of SzPUFA OrfA, SzPUFA OrfB, hSzThPUFA OrfC, and NoHetI. The SzACS-2 gene sequence is not contained in this construct. The version of the phaseolin promoter used in this construct was modified essentially as described in Bustos et al., 1989 (The Plant Cell, Vol. 1; 839-853), wherein the 5′ portion of the promoter was truncated and the phaseolin 5′ untranslated region was left intact. The pDAB7380 plasmid (FIG. 29; SEQ ID NO:49) was constructed using a multi-site Gateway L-R recombination reaction.

[0356] pDAB7380 contains three PUFA synthase PTUs, one phosphopantetheinyl transferase PTU and a phosphinothricin acetyl transferase PTU. Specifically, the first PUFA synthase PTU contains the PvPhas Promoter v4, PvPhas 5′ UTR, SzPUFA OrfA v3 and AtuORF23 3′ UTR v1. The second PUFA synthase PTU contains the PvPhas Promoter v4, PvPhas 5′ UTR, SzPUFA OrfB v3 and AtuORF23 3′ UTR v1. The third PUFA synthase PTU contains the PvPhas Promoter v4, PvPhas 5′ UTR, hSzThPUFA OrfC v3 and AtuORF23 3′ UTR v1. The phosphopantetheinyl transferase PTU contains the PvPhas Promoter v5, PvPhas 5′ UTR, NoHetI v3 and AtuORF23 3′ UTR v1.

[0357] Plasmids pDAB7375, pDAB7376, pDAB7377, pDAB7378 and pDAB7333 were recombined to form pDAB7380. Specifically, the four PTUs described above were placed in a head-to-tail orientation within the T-strand DNA border regions of the plant transformation binary pDAB7333. The order of the genes is: SzPUFA OrfA v3, SzPUFA OrfB v3, hSzThPUFA OrfC v3, NoHetI v3. pDAB7333 also contains the phosphinothricin acetyl transferase PTU: CsVMV promoter v2, PAT v5, AtuORF1 3′UTR v4 in addition to other regulatory elements such as Overdrive and T-stand border sequences (T-DNA Border A and T-DNA Border B). Recombinant plasmids containing the five PTUs were then isolated and tested for incorporation of the five PTUs with restriction enzyme digestion and DNA sequencing.

Construction of pDAB9323

[0358] pDAB9323 is a binary plasmid that was constructed to contain native, non-codon optimized versions of SzPUFA OrfA, SzPUFA OrfB, hSzThPUFA OrfC, SzACS-2, and NoHetI. The pDAB9323 plasmid (FIG. 30; SEQ ID NO:50) was constructed using a multi-site Gateway L-R recombination reaction.

[0359] pDAB9323 contains three PUFA synthase PTUs, one acyl-CoA synthetase PTU, one phosphopantetheinyl transferase PTU and a phosphinothricin acetyl transferase PTU. Specifically, the first PUFA synthase PTU contains the PvPhas Promoter v3, PvPhas 5′ UTR, SzPUFA OrfA v2, PvPhas 3′ UTR v1 and PvPhas 3′ MAR v2 (unannotated on the plasmid map). The second PUFA synthase PTU contains the PvPhas Promoter v3, PvPhas 5′ UTR, SzPUFA OrfB v2, PvPhas 3′ UTR v1 and PvPhas 3′ MAR v2 (unannotated on the plasmid map). The third PUFA synthase PTU contains the PvPhas Promoter v3, PvPhas 5′ UTR, SzPUFA OrfC v2, PvPhas 3′ UTR v1 and PvPhas 3′ MAR v2 (unannotated on the plasmid map). The acyl-CoA synthetase PTU contains the PvPhas Promoter v3, PvPhas 5′ UTR, SzACS-2 v2 gene, PvPhas 3′ UTR v1 and PvPhas 3′ MAR v2 (unannotated on the plasmid map). The phosphopantetheinyl transferase PTU contains the PvPhas Promoter v3, PvPhas 5′ UTR, NoHetI v2, PvPhas 3′ UTR v1 and PvPhas 3′ MAR v2 (unannotated on the plasmid map).

[0360] Plasmids pDAB9307, pDAB9311, pDAB9315, pDAB9322 and pDAB7333 were recombined to form pDAB9323. Specifically, the five PTUs described above were placed in a head-to-tail orientation within the T-strand DNA border regions of the plant transformation binary pDAB7333. The order of the genes is: SzPUFA OrfA v2, SzPUFA OrfB v2, SzPUFA OrfC v2, NoHetI v2. pDAB7333 also contains the phosphinothricin acetyl transferase PTU: CsVMV promoter v2, PAT v5, AtuORF1 3′UTR v4 in addition to other regulatory elements such as Overdrive and T-stand border sequences (T-DNA Border A and T-DNA Border B). Recombinant plasmids containing the six PTUs were then isolated and tested for incorporation of the six PTUs with restriction enzyme digestion and DNA sequencing.

Construction of pDAB9330

[0361] pDAB9330 is a binary plasmid that was constructed to contain rebuilt, codon optimized versions of SzPUFA OrfA, SzPUFA OrfB, hSzThPUFA OrfC, SzACS-2, and NoHetI. The pDAB9330 plasmid (FIG. 31; SEQ ID NO:51) was constructed using a multi-site Gateway L-R recombination reaction. pDAB9330 contains three PUFA synthase PTUs, one acyl-CoA synthetase PTU, one phosphopantetheinyl transferase PTU and a phosphinothricin acetyl transferase PTU. Specifically, the first PUFA synthase PTU contains the PvPhas Promoter v3, PvPhas 5′ UTR, SzPUFA OrfA v3, PvPhas 3′ UTR v1 and PvPhas 3′ MAR v2 (unannotated on the plasmid map). The second PUFA synthase PTU contains the PvPhas Promoter v3, PvPhas 5′ UTR, SzPUFA OrfB v3, PvPhas 3′ UTR and PvPhas 3′ MAR v2 (unannotated on the plasmid map). The third PUFA synthase PTU contains the PvPhas Promoter v3, PvPhas 5′ UTR, hSzThPUFA OrfC v3, PvPhas 3′ UTR v1 and PvPhas 3′ MAR v2 (unannotated on the plasmid map). The acyl-CoA synthetase PTU contains the PvPhas Promoter v3, PvPhas 5′ UTR, SzACS-2 v3 gene, PvPhas 3′ UTR v1 and PvPhas 3′ MAR v2 (unannotated on the plasmid map). The phosphopantetheinyl transferase PTU contains the PvPhas Promoter v3, PvPhas 5′ UTR, NoHetI v3, PvPhas 3′ UTR v1 and PvPhas 3′ MAR v2 (unannotated on the plasmid map).

[0362] Plasmids pDAB9324, pDAB9325, pDAB9326, pDAB9329 and pDAB7333 were recombined to form pDAB9330. Specifically, the five PTUs described above were placed in a head-to-tail orientation within the'T-strand DNA border regions of the plant transformation binary pDAB7333. The order of the genes is: SzPUFA OrfA v3, SzPUFA OrfB v3, hSzThPUFA OrfC v3, SzACS-2 v3, NoHetI v3. pDAB7333 also contains the phosphinothricin acetyl transferase PTU: CsVMV promoter v2, PAT v5, AtuORF1 3′UTR v4 in addition to other regulatory elements such as Overdrive and T-stand border sequences (T-DNA Border A and T-DNA Border B). Recombinant plasmids containing the six PTUs were then isolated and tested for incorporation of the six PTUs with restriction enzyme digestion and DNA sequencing.

Construction of pDAB9337

[0363] pDAB9337 is a binary plasmid that was constructed to contain rebuilt, codon optimized versions of SzPUFA OrfA, SzPUFA OrfB, hSzThPUFA OrfC, and NoHetI expression of which is driven by the phaseolin promoter. The pDAB9337 plasmid (FIG. 32; SEQ ID NO:52) was constructed using a multi-site Gateway L-R recombination reaction.

[0364] pDAB9337 contains three PUFA synthase PTUs, one phosphopantetheinyl transferase PTU and a phosphinothricin acetyl transferase PTU. Specifically, the first PUFA synthase PTU contains the PvPhas Promoter v3, PvPhas 5′ UTR, SzPUFA OrfA v3, PvPhas 3′ UTR v1 and PvPhas 3′ MAR v2 (unannotated on the plasmid map). The second PUFA synthase PTU contains the PvPhas Promoter v3, PvPhas 5′ UTR, SzPUFA OrfB v3, PvPhas 3′ UTR v1 and PvPhas 3′ MAR v2 (unannotated on the plasmid map). The third PUFA synthase PTU contains the PvPhas Promoter v3, PvPhas 5′ UTR, hSzThPUFA OrfC v3, PvPhas 3′ UTR v1 and PvPhas 3′ MAR v2 (unannotated on the plasmid map). The phosphopantetheinyl transferase PTU contains the PvPhas Promoter v3, PvPhas 5′ UTR, NoHetI v3, PvPhas 3′ UTR v1 and PvPhas 3′ MAR v2 (unannotated on the plasmid map).

[0365] Plasmids pDAB9324, pDAB9325, pDAB9326, pDAB9328 and pDAB7333 were recombined to form pDAB9337. Specifically, the four PTUs described above were placed in a head-to-tail orientation within the T-strand DNA border regions of the plant transformation binary pDAB7333. The order of the genes is: SzPUFA OrfA v3, SzPUFA OrfB v3, hSzThPUFA OrfC v3, NoHetI v3. pDAB7333 also contains the phosphinothricin acetyl transferase PTU: CsVMV promoter v2, PAT v5, AtuORF1 3′UTR v4 in addition to other regulatory elements such as Overdrive and T-stand border sequences (T-DNA Border A and T-DNA Border B). Recombinant plasmids containing the five PTUs were then isolated and tested for incorporation of the five PTUs with restriction enzyme digestion and DNA sequencing.

Construction of pDAB9338

[0366] pDAB9338 is a binary plasmid that was constructed to contain rebuilt, codon optimized versions of SzPUFA OrfA, SzPUFA OrfB, hSzThPUFA OrfC, and NoHetI. The phaseolin promoter is used to drive expression of SzPUFA OrfA, and PvDlec2 promoter is used to drive the other transgenes. The pDAB9338 plasmid (FIG. 33; SEQ ID NO:53) was constructed using a multi-site Gateway L-R recombination reaction.

[0367] pDAB9338 contains three PUFA synthase PTUs, one phosphopantetheinyl transferase PTU and a phosphinothricin acetyl transferase PTU. Specifically, the first PUFA synthase PTU contains the PvPhas Promoter v3, PvPhas 5′ UTR, SzPUFA OrfA v3, PvPhas 3′ UTR v1 and PvPhas 3′ MAR v2 (unannotated on the plasmid map). The second PUFA synthase PTU contains the PvDlec2 promoter v2, 2S 5′ UTR, SzPUFA OrfB v3 and At2S SSP terminator v1. The third PUFA synthase PTU contains the PvDlec2 promoter v2, 2S 5′ UTR, hSzThPUFA OrfC v3 and At2S SSP terminator v1. The phosphopantetheinyl transferase PTU contains the PvDlec2 promoter v2, 2S 5′ UTR, NoHetI v3 and At2S SSP terminator v1.

[0368] Plasmids pDAB9324, pDAB7335, pDAB7336, pDAB7338 and pDAB7333 were recombined to form pDAB9338. Specifically, the four PTUs described above were placed in a head-to-tail orientation within the T-strand DNA border regions of the plant transformation binary pDAB7333. The order of the genes is: SzPUFA OrfA v3, SzPUFA OrfB v3, hSzThPUFA OrfC v3, NoHetI v3. pDAB7333 also contains the phosphinothricin acetyl transferase PTU: CsVMV promoter v2, PAT v5, AtuORF1 3′UTR v4 in addition to other regulatory elements such as Overdrive and T-stand border sequences (T-DNA Border A and T-DNA Border B). Recombinant plasmids containing the five PTUs were then isolated and tested for incorporation of the five PTUs with restriction enzyme digestion and DNA sequencing.

Construction of pDAB9344

[0369] pDAB9344 is a binary plasmid that was constructed to contain rebuilt, codon optimized versions of SzPUFA OrfA, SzPUFA OrfB, hSzThPUFA OrfC, and NoHetI all of which contain the Ribulose Bisphosphate Carboxylase small chain 1A (labeled as SSU-TP v1) which is fused to the amino terminus of the coding sequence. The phaseolin promoter is used to drive expression of SzPUFA OrfA, and PvDlec2 promoter is used to drive the other transgenes.

[0370] The pDAB9344 plasmid (FIG. 34; SEQ ID NO:54) was constructed using a multi-site Gateway L-R recombination reaction. pDAB9344 contains three PUFA synthase PTUs, one phosphopantetheinyl transferase PTU and a phosphinothricin acetyl transferase PTU. Specifically, the first PUFA synthase PTU contains the PvPhas Promoter v3, PvPhas 5′ UTR, SzPUFA OrfA v4, PvPhas 3′ UTR v1 and PvPhas 3′ MAR v2 (unannotated on the plasmid map). The second PUFA synthase PTU contains the PvPhas Promoter v3, PvPhas 5′ UTR, SzPUFA OrfB v4, PvPhas 3′ UTR v1 and PvPhas 3′ MAR v2 (unannotated on the plasmid map). The third PUFA synthase PTU contains the PvPhas Promoter v3, PvPhas 5′ UTR, hSzThPUFA OrfC v4, PvPhas 3′ UTR v1 and PvPhas 3′ MAR v2 (unannotated on the plasmid map). The phosphopantetheinyl transferase PTU contains the PvPhas Promoter v3, PvPhas 5′ UTR, NoHetI v4, PvPhas 3′ UTR v1 and PvPhas 3′ MAR v2 (unannotated on the plasmid map).

[0371] Plasmids pDAB9343, pDAB9342, pDAB9340, pDAB9331 and pDAB7333 were recombined to form pDAB9344. Specifically, the four PTUs described above were placed in a head-to-tail orientation within the T-strand DNA border regions of the plant transformation binary pDAB7333. The order of the genes is: SzPUFA OrfA v4, SzPUFA OrfB v4, hSzThPUFA OrfC v4, NoHetI v4, pDAB7333 also contains the phosphinothricin acetyl transferase PTU: CsVMV promoter v2, PAT v5, AtuORF1 3′UTR v4 in addition to other regulatory elements such as Overdrive and T-stand border sequences (T-DNA Border A and T-DNA Border B). Recombinant plasmids containing the six PTUs were then isolated and tested for incorporation of the five PTUs with restriction enzyme digestion and DNA sequencing.

Construction of pDAB9396

[0372] pDAB9396 is a binary plasmid that was constructed to contain rebuilt, codon optimized versions of SzPUFA OrfA, SzPUFA OrfB, hSzThPUFA OrfC, SzACS-2, and NoHetI. The phaseolin promoter is used to drive expression of SzPUFA OrfA and SzPUFA OrfB. The PvDlec2 promoter is used to drive the other transgenes; hSzThPUFA OrfC, SzACS-2, and NoHetI.

[0373] The pDAB9396 plasmid (FIG. 35; SEQ ID NO:55) was constructed using a multi-site Gateway L-R recombination reaction. pDAB9396 contains three PUFA synthase PTUs, one phosphopantetheinyl transferase PTU and a phosphinothricin acetyl transferase PTU. Specifically, the first PUFA synthase PTU contains the PvPhas Promoter v3, PvPhas 5′ UTR, SzPUFA OrfA v3, PvPhas 3′ UTR v1 and PvPhas 3′ MAR v2 (unannotated on the plasmid map). The second PUFA synthase PTU contains the PvDlec2 promoter v2, 2S 5′ UTR, SzPUFA OrfB v3 and At2S SSP terminator v1. The third PUFA synthase PTU contains the PvDlec2 promoter v2, 2S 5′ UTR, hSzThPUFA OrfC v3 and At2S SSP terminator v1. The acyl-CoA synthetase PTU contains the PvPhas Promoter v3, PvPhas 5′ UTR, SzACS-2 v3 gene, PvPhas 3′ UTR v1 and PvPhas 3′ MAR v2 (unannotated on the plasmid map). The phosphopantetheinyl transferase PTU contains the PvDlec2 promoter v2, 2S 5′ UTR, NoHetI v3 and At2S SSP terminator v1.

[0374] Plasmids pDAB9324, pDAB7335, pDAB7336, pDAB7339 and pDAB7333 were recombined to form pDAB9338. Specifically, the five PTUs described above were placed in a head-to-tail orientation within the T-strand DNA border regions of the plant transformation binary pDAB7333. The order of the genes is: SzPUFA OrfA v3, SzPUFA OrfB v3, hSzThPUFA OrfC v3, SzACS-2 v3, NoHetI v3. pDAB7333 also contains the phosphinothricin acetyl transferase PTU: CsVMV promoter v2, PAT v5, AtuORF1 3′UTR v4 in addition to other regulatory elements such as Overdrive and T-stand border sequences (T-DNA Border A and T-DNA Border B). Recombinant plasmids containing the five PTUs were then isolated and tested for incorporation of the six PTUs with restriction enzyme digestion and DNA sequencing.

Construction of pDAB101412

[0375] pDAB101412 is a binary plasmid that was constructed to contain rebuilt, codon optimized versions of SzPUFA OrfA, SzPUFA OrfB, hSzThPUFA OrfC, SzACS-2, and NoHetI. The version of the phaseolin promoter used in this construct was modified essentially as described in Bustos et al., 1989 (The Plant Cell, Vol. 1; 839-853), wherein the 5′ portion of the promoter was truncated and the phaseolin 5′ untranslated region was left intact. The truncated phaseolin promoter sequences are identified throughout this application as version 4 (v4), version 5 (v5), and version 6 (v6). The pDAB101412 plasmid (FIG. 36; SEQ ID NO:56) was constructed using a multi-site Gateway L-R recombination reaction.

[0376] pDAB101412 contains three PUFA synthase PTUs, one acyl-CoA synthetase PTU, one phosphopantetheinyl transferase PTU and a phosphinothricin acetyl transferase PTU. Specifically, the first PUFA synthase PTU contains the PvPhas Promoter v4, PvPhas 5′ UTR, SzPUFA OrfA v3 and AtuORF23 3′ UTR v1. The second PUFA synthase PTU contains the PvPhas Promoter v4, PvPhas 5′ UTR, SzPUFA OrfB v3 and AtuORF23 3′ UTR v1. The third PUFA synthase PTU contains the PvPhas Promoter v4, PvPhas 5′ UTR, hSzThPUFA OrfC v3 and AtuORF23 3′ UTR v1. The acyl-CoA synthetase PTU contains the PvPhas Promoter v4, PvPhas 5′ UTR, 2S 5′ UTR, SzACS-2 v3 gene and AtuORF23 5′ UTR v1. The phosphopantetheinyl transferase PTU contains the PvPhas Promoter v5, PvPhas 5′ UTR, NoHetI v3 and AtuORF23 3′ UTR v1.

[0377] Plasmids pDAB7375, pDAB7376, pDAB7377, pDAB7398 and pDAB7333 were recombined to form pDAB101412. Specifically, the five PTUs described above were placed in a head-to-tail orientation within the T-strand DNA border regions of the plant transformation binary pDAB7333. The order of the genes is: SzPUFA OrfA v3, SzPUFA OrfB v3, hSzThPUFA OrfC v3, SzACS-2 v3, NoHetI v3. pDAB7333 also contains the phosphinothricin acetyl transferase PTU: CsVMV promoter v2, PAT v5, AtuORF1 3′UTR v4 in addition to other regulatory elements such as Overdrive and T-stand border sequences (T-DNA Border A and T-DNA Border B). Recombinant plasmids containing the five PTUs were then isolated and tested for incorporation of the six PTUs with restriction enzyme digestion and DNA sequencing.

Canola Transformation with Promoters which Express Early in Seed Development

[0378] The plasmids are used to stably transform canola plants using the protocols described above. Transgenic canola plants are isolated and molecularly characterized. The use of alternative constructs result in canola plants which contain greater amounts of DHA and LC-PUFAs. The resulting LC-PUFA accumulation is determined and canola plants which produce 0.01% to 15% DHA or 0.01% to 15% LC-PUFA are identified.

### Example 13

### Co-Expression of DGAT2 or ACCase with the Algal PUFA Synthase Gene Suite within Canola

[0379] Oil content within canola plants is further modified by transformation of chimeric DNA molecules which encode and express an acetyl CoA carboxylase (ACCase) or an type 2 diacylglycerol acyltransferase (DGAT2). These genes are co-expressed with the algal PUFA synthase genes described above, either through breeding canola plants containing the ACCase or DGAT2 expression cassette with canola plants containing the PUFA synthase genes; or by transforming canola plants with a gene stack containing the ACCase or DGAT2 and the PUFA synthase genes. Regulatory elements necessary for expression of an ACCase or DGAT2 coding sequence can include those described above. Additional regulatory elements expression sequences known in the art can also be used. The ACCase and DGAT2 expression cassettes are transformed into canola using transformation protocols described above. Transformation can occur as molecular stacks of the ACCase or DGAT2 expression cassette combined with the PUFA synthase OrfA, PUFA synthase OrfB, PUFA synthase OrfC, acyl-CoA synthetase and 4′ phosphopantetheinyl transferase HetI expression cassettes; or as independent ACCase or DGAT2 expression cassettes linked to a selectable marker and then subsequently crossed with canola plants which contain the PUFA synthase OrfA, PUFA synthase OrfB, PUFA synthase OrfC, acyl-CoA synthetase and 4′ phosphopantetheinyl transferase HetI expression cassettes. Positive transformants are isolated and molecularly characterized. Canola plants are identified which contain increased accumulation of LC-PUFAs in the plant, the seed of the plant, or plant oil concentrations compared to untransformed control canola plants. Such increases can range from a 1.2 to a 20-fold increase.

[0380] The over-expression of ACCase in the cytoplasm can produce higher levels of malonyl-CoA. Canola plants or seed containing increased levels of cytoplasmic malonyl-CoA can produce subsequently higher levels of the long-chain polyunsaturated fatty acid (LC-PUFA) when the algal PUFA synthase genes are present and expressed. DGAT2 genes which are expressed within canola plants can be capable of preferentially incorporating significant amounts of docosahexaenoic acid (DHA) and eicosapentaenoic acid (EPA) into triacylglycerol. DGAT2 genes with substrate preference toward LC-PUFAs (see e.g., WO 2009/085169) can increase incorporation of these fatty acids into triacylglycerol (TAG). Such DGAT genes are useful for directing the incorporation of LC-PUFA, particularly DHA, into TAG and for increasing the production of TAG in plants and other organisms.

### Example 14

### Use of the Native Acyl-CoA Synthetase Gene Sequence for Higher Levels of Acyl-CoA Synthetase Expression within Plants

[0381] An alternative version of the acyl-CoA synthetase gene from Schizochytrium sp. was created by modifying the native gene sequence to remove superfluous open reading frames. This version was labeled as “SzACS-2 v4” and listed as SEQ ID NO:34. The sequence was synthesized by the service provider, DNA 2.0 (Menlo Park, Calif.). The coding sequence was incorporated into a plant expression cassette containing a promoter and a 3′ untranslated region, which were described in these Examples. The resulting expression cassette was used to replace the acyl-CoA synthetase expression cassette, described above as “SzACS-2 v3,” SEQ ID NO:9, which was combined w′ th the PUFA synthase OrfA, PUFA synthase OrfB, PUFA synthase chimeric OrfC and 4′ phosphopantetheinyl transferase HetI expression cassettes to construct pDAB7361, pDAB7362 and pDAB7363. The new plasmids which contain the “SzACS-2 v4” expression cassette were given unique identification labels. The newly constructed plasmids can be used to stably transform canola plants. Transgenic canola plants are isolated and molecularly characterized. The alternative version of the gene, “SzACS-2 v4,” can result in canola plants which contain greater amounts of DHA and LC-PUFAs. The resulting LC-PUFA accumulation is determined and canola plants which produce 0.01% to 15% DHA or 0.01% to 10% EPA are identified.

### Example 15

### PUFA Synthase Activity in Mature Transgenic Canola Seed

[0382] PUFA synthase activity was detected in extracts from mature T1 transgenic canola seed from plants generated utilizing the Agrobacterium vector pDAB 7361 (Event 5197[14]-032). The seed was soaked with water for 3-4 hours prior to removing the seed coats and grinding on dry ice in extraction buffer (200 mM phosphate pH 7.0, 1 mM EDTA, 1 mM DTT, 50 mM NaCl, 5% glycerol, 1% PVPP, 0.52 μg/mL antipain, 0.58 μg/mL leupeptin, 0.83 μg/mL pepstatin A, 12 μg/mL TLCK, 12 μg/mL TPCK, and 6 μg/mL soybean trypsin inhibitor) and microfuging at 4° C. for 10 min. The fat pad was removed, and the resulting pellet was incubated with higher ionic strength buffer prior to re-centrifugation. The fat pad and lipid layer were removed from the sample and the aqueous supernatant passed through Zeba desalt columns pre-equilibrated with 50 mM phosphate pH 7.2, 1 mM DTT, 10% glycerol, and 1 mM EDTA. Untransformed Nexera 710 seeds were processed in parallel as a negative control. Samples from both seed sets were assayed using the HIP extraction and TLC method described in Metz et al., Plant Physiol. Biochem. 47:6 (2009) (FIG. 16). Assay conditions were modified to include 2 mM NADH, a NADH regeneration system (glucose+glucose dehydrogenase), continual shaking and a final malonyl-CoA concentration of 100 μM (0.064 μCi/100 μL per assay). Assays of the resulting supernatants were normalized by volume and indicated that FFA formation could be detected after 60 min. This was not observed in the Nexera 710 control, and indicates that the FFA formation was from DHA formation via PUFA synthase.

### Example 16

### Pantetheinylation of OrfA Produced in Canola by Co-Expressed HetI

[0383] OrfA contains nine acyl-carrier protein domains that each require derivatization with a phosphopantetheine group by a phosphopantetheinyl transferase (PPTase) to be functional. The degree of pantetheinylation of OrfA by the PPTase HetI in transgenic canola seeds was assessed by nano-liquid chromatography-mass spectrometry (nanoLC-MS) evaluation of tryptic peptides containing the pantetheinylation site from various OrfA samples.

[0384] Recombinant holo and apo Orf A polypeptide standards were produced in E. coli by co-expression with or without HetI. Expression of OrfA in the absence of HetI generates a non-functional protein because endogenous PPTases from E. coli are incapable of adding the phosphopantetheine group (Hauvermale et al., Lipids 41:739-747; 2006). In contrast, expression with HetI yields an OrfA protein which has a high degree of pantetheinylation. To extract E. coli-expressed OrfA, frozen cells from 0.5 L of recombinant cell culture were resuspended in 20 mL of extraction buffer: 20 mM Tris pH 7.0, 1 mg/mL lysozyme, 1 mM EDTA, 1 mM PMSF, 1 mM DTT, 0.52 μg/mL antipain, 0.58 μg/mL leupeptin, 0.83 μg/mL pepstatin A, 12 μg/mL TLCK, 12 μg/mL TPCK, 6 μg/mL soybean trypsin inhibitor. After lysis, the extract was treated with DNase and 4 mM MgCl₂, clarified by centrifugation and the supernatant frozen at −80° C.

[0385] Plant-produced OrfA was isolated from re-hydrated mature canola seeds of event 5197[14]-032.002 using the extraction method previously described for in vitro assay of canola-produced PUFA synthase. OrfA protein from both E. coli standards and the canola sample were enzymatically digested and analyzed by nanoLC-MS using an Agilent ChipCube nanochromatography inlet with MS analysis by an Agilent QTOF mass spectrometer (model 6530). The QTOF was programmed to carry out automated MS² analysis to generate peptide sequence data during chromatography. The essential feature of the method is that the mass spectrometer is programmed to carry out a full-scan MS scan, followed by automated MS² of the three most abundant ions to generate MS² sequence spectra. Ions were subsequently excluded from MS² after 2 occurrences, for an exclusion period of 30 sec. An internal reference was continuously infused during nanospray to generate reference ions for internal calibration of the QTOF (at m/z 299.29446 and 1221.99064). Ions commonly found from carry-over of the calibration stock were defined as excluded ions, in order to prevent spurious MS² scans of these ions. MS scans were carried over the range of m/z 295-2400. MS² scans were carried over the range of m/z 59-3000. Automated MS² was carried out giving preference to charge states in the following order: +2>+3>(>+3)>unknown >+1.

[0386] Tandem mass spectra were extracted by Mascot Distiller (Matrix Science, London UK; version 2.3.2). Charge state deconvolution and deisotoping were not performed. All MS/MS spectra were analyzed using Mascot (Matrix Science, London, UK; version 2.2.06) and X! Tandem (www.thegpm.org; version 2007.01.01.1). Mascot and X! Tandem were both set up to search a protein sequence database containing the full length sequence of the OrfA protein assuming trypsin digestion specificity. Mascot and X! Tandem were searched with a fragment ion mass tolerance of 0.30 Da and a parent ion tolerance of 10.0 ppm. Oxidation of methionine and phosphopantetheine of serine were specified in Mascot and X! Tandem as variable modifications.

[0387] Scaffold (version Scaffold_{—}2_{—}05_{—}02, Proteome Software Inc., Portland, Oreg.) was used to validate MS/MS based peptide and protein identifications. Peptide identifications were accepted if they could be established at greater than 95.0% probability as specified by the Peptide Prophet algorithm (Keller et al., Anal. Chem. 74:5383-92 (2002)). Protein identifications were accepted if they could be established at greater than 99.0% probability and contained at least 2 identified peptides. Protein probabilities were assigned by the Protein Prophet algorithm (Nesvizhskii, Anal Chem. 75:4646-58 (2003)). Proteins that contained similar peptides and could not be differentiated based on MS/MS analysis alone were grouped to satisfy the principles of parsimony. Database searches identified tryptic peptides corresponding to the apo forms of pantetheinylation site 1 (SEQ ID NO:78 TGYETDMIEADMELETELGIDSIK) and pantetheinylation sites 2-9 (SEQ ID NO:77 TGYETDMIESDMELETELGIDSIK). Direct evidence for pantetheinylated peptides was not observed.

[0388] To estimate the degree of pantetheinylation of sites 2-9 in OrfA isolated from canola, the amount of the apo2-9 peptide was measured relative to six different reference peptides identified from other regions of the Orf A molecule (Table 21).

TABLE 21
Peptides used in calculating the relative amount of the apo2-9 peptide
in OrfA digests.

| | | Amino | | |
|---|---|---|---|---|
| | | acid | | |
| SEQ ID | | start | | |
| NO: | Peptide | position | z | m/z |
| SEQ ID | [LNYVVVEK] | 148 | 2 | 482.279 |
| NO: 71 | | | | |
| SEQ ID | [FGALGGFISQQAER] | 2200 | 2 | 740.880 |
| NO: 72 | | | | |
| SEQ ID | [AEIAGGSAPAPAAAAPAPAAAAPAPAAPAPAVSSELLEK] | 1416 | 4 | 851.452 |
| NO: 73 | | | | |
| SEQ ID | [AAPAAAAPAVSNELLEK] | 1216 | 2 | 811.940 |
| NO: 74 | | | | |
| SEQ ID | [IVQHRPVPQDKPFYITLR] | 2854 | 5 | 442.255 |
| NO: 75 | | | | |
| SEQ ID | [IFVEFGPK] | 880 | 2 | 468.770 |
| NO: 76 | | | | |
| apo2-9) | [TGYETDMIESDMELETELGIDSIK] | 1245 | 3 | 907.079 |
| SEQ ID | | | | |
| NO: 77 | | | | |

“Start” refers to the start position of the indicated peptide in the full length protein. The start position for apo2-9 refers to the first occurrence of the peptide in the protein sequence. The abbreviation “z” indicates charge, and the abbreviation m/z indicates mass over charge.

[0389] The internal ratio of the apo2-9 peptide to the reference peptides in the E. coli derived protein (without HetI) was taken as an estimate of no pantetheinylation, whereas the internal ratio in the E. coli derived protein expressed with HetI was taken as an estimate of a high degree of pantetheinylation. These internal ratios assume that the molar abundance of the reference peptides is equivalent, regardless of the source of the OrfA protein (FIG. 17). The ratio of the apo2-9 peptide to each of the six reference peptides was calculated and averaged. (Three ratios were calculated for the six reference peptides.) In addition, three ratios of six reference peptides to each other were calculated (ref1/ref2, ref3/ref4 and ref5/ref6) to demonstrate that the reference peptides did not vary significantly between the three OrfA samples (FIG. 17) and would be suitable for calculating the relative amount of the apo2-9 peptide present.

[0390] In contrast to the calculated ratios of the reference peptides, the ratio of apo2-9 to each of the reference peptides showed that there were dramatically lower levels of the apo2-9 peptide in both OrfA/HetI and the canola samples in comparison to the OrfA standard without HetI, (FIG. 18). The simplest explanation of these results is that the pantetheinylation site on the apo2-9 peptide is substantially occupied by phosphopantetheinyl groups, thereby significantly decreasing the molar abundance of apo2-9 peptides. This indicates that the canola-expressed PPTase, HetI, was functionally capable of activation of OrfA in transgenic canola seed, and the canola-expressed OrfA ACP units are functionally competent.

### Example 17

### Additional Constructs

### Introducing Promoter Diversity to Reduce the Duplication of Regulatory Elements

[0391] Gene silencing is a phenomenon which has been observed in progeny generations of transgenic canola events. Several review articles discuss Transcriptional Gene Silencing (TGS) and Post Transcriptional Gene Silencing (PTGS), such as those of Waterhouse et al., 2001 (Nature 411:834-842), Vaucheret and Fagard, 2001 (Trends in Genetics 17(1):29-35, and Okamoto and Hirochika, 2001 (Trends in Plant Sci. 6 (11): 527-534). In plants, gene silencing can be triggered by the duplication of transgenic polynucleotide sequences (tandem repeat transgene sequences, inverted repeat transgene sequences, or multiple insertions into the chromosome) or when a sequence homologous to the target gene sequences is carried either by an infecting plant virus or by the T-DNA of Agrobacterium tumefaciens.

[0392] In addition, the duplication of transgene polynucleotide sequences can act as triggers for construct instability. Multiple transgene sequences which share high levels of sequence similarity can fold back on one another. Rearrangements can occur via homologous recombination, wherein intervening sequences of DNA are excised. As a result fragments of DNA which are located between repeated transgene polynucleotide sequences are excised.

[0393] One strategy in designing plasmid vectors is to introduce promoter diversity into a construct by incorporating multiple, unique seed specific promoters which maintain high level expression of each transgene. Introducing promoter sequence diversity into the plasmid vectors can reduce gene silencing and improve plasmid stability. Multiple seed specific promoters include PvDlec2, Phaseolin, and Napin (U.S. Pat. No. 5,608,152). These promoters are relatively comparable in promoter activity such as tissue specificity, levels of expression, duration of expression, etc.

Construction of pDAB7733

[0394] The pDAB7733 binary plasmid (FIG. 37; SEQ ID NO:57) was constructed using a multi-site Gateway L-R recombination reaction. pDAB7733 contains three PUFA synthase PTUs, one phosphopantetheinyl transferase PTU and a phosphinothricin acetyl transferase PTU. Specifically, the first PUFA synthase PTU contains the PvPhas promoter v4, PvPhas 5′ UTR, SzPUFA OrfA v3 and AtuORF23 3′ UTR v1. The second PUFA synthase PTU contains the BnaNapinC promoter v1, BnaNapinC 5′ UTR, SzPUFA OrfB v3 and BnaNapinC 3′ UTR v1. The third PUFA synthase PTU contains the PvDlec2 promoter v2, 2S 5′ UTR, hSzThPUFA OrfC v3 and At2S SSP terminator v1. The phosphopantetheinyl transferase PTU contains the PvPhas promoter v5, PvPhas 5′ UTR, NoHetI v3 and AtuOrf23 3′ UTR v1.

[0395] Plasmids pDAB7375, pDAB7731, pDAB7336, pDAB7378 and pDAB7333 were recombined to form pDAB7733. Specifically, the four PTUs described above were placed in a head-to-tail orientation within the T-strand DNA border regions of the plant transformation binary pDAB7333. The order of the genes is: SzPUFA OrfA v3, SzPUFA OrfB v3, hSzThPUFA OrfC v3, NoHetI v3. pDAB7333 also contains the phosphinothricin acetyl transferase PTU: CsVMV promoter v2, PAT v5, AtuORF1 3′UTR v4 in addition to other regulatory elements such as Overdrive and T-stand border sequences (T-DNA Border A and T-DNA Border B). Recombinant plasmids containing the five PTUs were then isolated and tested for incorporation of the five PTUs with restriction enzyme digestion and DNA sequencing.

Construction of pDAB7734

[0396] The pDAB7734 binary plasmid (FIG. 38; SEQ ID NO:58) was constructed using a multi-site Gateway L-R recombination reaction. pDAB7734 contains three PUFA synthase PTUs, one phosphopantetheinyl transferase PTU and a phosphinothricin acetyl transferase PTU. Specifically, the first PUFA synthase PTU contains the PvDlec2 promoter v2, 2S 5′ UTR, SzPUFA OrfA v3 and At2S SSP terminator v1. The second PUFA synthase PTU contains the PvPhas promoter v4, PvPhas 5′ UTR, SzPUFA OrfB v3 and AtuORF23 3′ UTR v1. The third PUFA synthase PTU contains the BnaNapinC promoter v1, BnaNapinC 5′ UTR, hSzThPUFA OrfC v3 and BnaNapinC 3′ UTR v1. The phosphopantetheinyl transferase PTU contains the PvDlec2 promoter v2, 2S 5′ UTR, NoHetI v3 and At2S SSP terminator v1.

[0397] Plasmids pDAB7334, pDAB7376, pDAB7732, pDAB7338 and pDAB7333 were recombined to form pDAB7734. Specifically, the four PTUs described above were placed in a head-to-tail orientation within the T-strand DNA border regions of the plant transformation binary pDAB7333. The order of the genes is: SzPUA OrfA v3, SzPUFA OrfB v3, hSzThPUFA OrfC v3, NoHetI v3. pDAB7333 also contains the phosphinothricin acetyl transferase PTU: CsVMV promoter v2, PAT v5, AtuORF1 3′UTR v4 in addition to other regulatory elements such as Overdrive and T-stand border sequences (T-DNA Border A and T-DNA Border B). Recombinant plasmids containing the five PTUs were then isolated and tested for incorporation of the five PTUs with restriction enzyme digestion and DNA sequencing.

Construction of pDAB101493

[0398] The pDAB101493 binary plasmid (FIG. 39; SEQ ID NO:59) was constructed using a multi-site Gateway L-R recombination reaction, pDAB101493 contains three PUFA synthase PTUs, one phosphopantetheinyl transferase PTU and a phosphinothricin acetyl transferase PTU. Specifically, the first PUFA synthase PTU contains the PvDlec2 promoter v2, 2S 5′ UTR, SzPUFA OrfA v3 and At2S SSP terminator v1. The second PUFA synthase PTU contains the PvPhas promoter v4, PvPhas 5′ UTR, SzPUFA OrfB v3 and AtuORF23 3′ UTR v1. The third PUFA synthase PTU contains the PvDlec2 promoter v2, 2S 5′ UTR, hSzThPUFA OrfC v3 and At2S SSP terminator v1. The phosphopantetheinyl transferase PTU contains the PvPhas promoter v5, PvPhas 5′ UTR, NoHetI v3 and AtuOrf23 3′ UTR v1.

[0399] Plasmids pDAB7334, pDAB7376, pDAB7336, pDAB7378 and pDAB7333 were recombined to form pDAB101493. Specifically, the four PTUs described above were placed in a head-to-tail orientation within the T-strand DNA border regions of the plant transformation binary pDAB7333. The order of the genes is: SzPUFA OrfA v3, SzPUFA OrfB v3, hSzThPUFA OrfC v3, NoHetI v3. pDAB7333 also contains the phosphinothricin acetyl transferase PTU: CsVMV promoter v2, PAT v5, AtuORF1 3′UTR v4 in addition to other regulatory elements such as Overdrive and T-stand border sequences (T-DNA Border A and T-DNA Border B). Recombinant plasmids containing the five PTUs were then isolated and tested for incorporation of the five PTUs with restriction enzyme digestion and DNA sequencing.

Construction of pDAB109507

[0400] The pDAB109507 plasmid (FIG. 40; SEQ ID NO:60) was constructed using a multi-site Gateway L-R recombination reaction. pDAB109507 contains three PUFA synthase PTUs, one phosphopantetheinyl transferase PTU and a phosphinothricin acetyl transferase PTU. Specifically, the first PUFA synthase PTU contains the PvPhas promoter v3, PvPhas 5′ UTR, SzPUFA OrfA v3 and PvPhas 3′ UTR v1 and PvPhas 3′ MAR v2 (unannotated on the plasmid map). The second PUFA synthase PTU contains the BnaNapinC promoter v1, BnaNapinC 5′ UTR, SzPUFA OrfB v3 and BnaNapinC 3′ UTR v1. The third PUFA synthase PTU contains the PvDlec2 promoter v2, 2S 5′ UTR, hSzThPUFA OrfC v3 and At2S SSP terminator v1. The phosphopantetheinyl transferase PTU contains the BoACP promoter/5′ UTR v1, NoHetI v3 and AtuOrf23 3′ UTR v1.

[0401] Plasmids pDAB9324, pDAB7731, pDAB7336, pDAB101485 and pDAB7333 were recombined to form pDAB109507. Specifically, the four PTUs described above were placed in a head-to-tail orientation within the T-strand DNA border regions of the plant transformation binary pDAB7333. The order of the genes is: SzPUFA OrfA v3, SzPUFA OrfB v3, hSzThPUFA OrfC v3, NoHetI v3. pDAB7333 also contains the phosphinothricin acetyl transferase PTU: CsVMV promoter v2, PAT v5, AtaORF1 3′UTR v4 in addition to other regulatory elements such as Overdrive and T-stand border sequences (T-DNA Border A and T-DNA Border B). Recombinant plasmids containing the five PTUs were then isolated and tested for incorporation of the five PTUs with restriction enzyme digestion and DNA sequencing.

Construction of pDAB109508

[0402] The pDAB109508 plasmid (FIG. 41; SEQ ID NO:61) was constructed using a multi-site Gateway L-R recombination reaction. pDAB109508 contains three PUFA synthase PTUs, one phosphopantetheinyl transferase PTU and a phosphinothricin acetyl transferase PTU. Specifically, the first PUFA synthase PTU contains the PvPhas promoter v3, PvPhas 5′ UTR, SzPUFA OrfA v3 and PvPhas 3′ UTR v1 and PvPhas 3′ MAR v2 (unannotated on the plasmid map). The second PUFA synthase PTU contains the BnaNapinC promoter v1, BnaNapinC 5′ UTR, SzPUFA OrfB v3 and BnaNapinC 3′ UTR v1. The third PUFA synthase PTU contains the PvDlec2 promoter v2, 2S 5′ UTR, hSzThPUFA OrfC v3 and At2S SSP terminator v1. The phosphopantetheinyl transferase PTU contains the PvDlec2 promoter v2, 2S 5′ UTR, NoHetI v3 and At2S SSP terminator v1.

[0403] Plasmids pDAB9324, pDAB7731, pDAB7336, pDAB7338 and pDAB7333 were recombined to form pDAB109508. Specifically, the four PTUs described above were placed in a head-to-tail orientation within the T-strand DNA border regions of the plant transformation binary pDAB7333. The order of the genes is: SzPUFA OrfA v3, SzPUFA OrfB v3, hSzThPUFA OrfC v3, NoHetI v3. pDAB7333 also contains the phosphinothricin acetyl transferase PTU: CsVMV promoter v2, PAT v5, AtuORF1 3′UTR v4 in addition to other regulatory elements such as Overdrive and T-stand border sequences (T-DNA Border A and T-DNA Border B). Recombinant plasmids containing the five PTUs were then isolated and tested for incorporation of the five PTUs with restriction enzyme digestion and DNA sequencing.

Construction of pDAB109509

[0404] The pDAB109509 plasmid (FIG. 42; SEQ ID NO:62) was constructed using a multi-site Gateway L-R recombination reaction. pDAB109509 contains three PUFA synthase PTUs, one phosphopantetheinyl transferase PTU and a phosphinothricin acetyl transferase PTU. Specifically, the first PUFA synthase PTU contains the PvDlec2 promoter v2, 2S 5′ UTR, SzPUFA OrfA v3 and At2S SSP terminator v1. The second PUFA synthase PTU contains the PvDlec2 promoter v2, 2S 5′ UTR, SzPUFA OrfB v3 and At2S SSP terminator v1. The third PUFA synthase PTU contains the PvDlec2 promoter v2, 2S 5′ UTR, hSzThPUFA OrfC v3 and At2S SSP terminator v1. The phosphopantetheinyl transferase PTU contains the BoACP promoter/5′ UTR v1, NoHetI v3 and AtuOrf23 3′ UTR v1.

[0405] Plasmids pDAB7334, pDAB7335, pDAB7336, pDAB101485 and pDAB7333 were recombined to form pDAB109509. Specifically, the four PTUs described above were placed in a head-to-tail orientation within the T-strand DNA border regions of the plant transformation binary pDAB7333. The order of the genes is: SzPUFA OrfA v3, SzPUFA OrfB v3, hSzThPUFA OrfC v3, NoHetI v3. pDAB7333 also contains the phosphinothricin acetyl transferase PTU: CsVMV promoter v2, PAT v5, AtuORF1 3′UTR v4 in addition to other regulatory elements such as Overdrive and T-stand border sequences (T-DNA Border A and T-DNA Border B). Recombinant plasmids containing the five PTUs were then isolated and tested for incorporation of the five PTUs with restriction enzyme digestion and DNA sequencing.

### Rearranging the Order of the Binary Construct PTUs to Reduce Fragmentation of Long Gene Sequences

[0406] The SzPUFA OrfA PTU was placed at the 3′ end of the binary construct to test whether the order of the PTU cassettes could reduce fragmentation and rearrangements in isolated transgenic events. SzPUFA OrfA is a large open reading frame (˜8,700 b.p.) containing nine tandem acyl carrier protein repeats. In the first series of completed constructs, the SzPUFA OrfA PTU was positioned to be integrated first into the plant chromosome. The SzPUFA OrfA PTU was subsequently followed by the remaining PUFA synthesis-related gene PTUs as they decreased in molecular size. Molecular analysis of the SzPUFA OrfA coding region indicated that some transgenic canola and Arabidopsis thaliana events contained fragmented insertions. Alternative Construct Designs are described, wherein the order of the PUFA synthase PTUs has been changed to the following configuration; hSzThPUFA OrfC PTU, SzPUFA OrfB PTU, NoHetI PTU, SzPUFA OrfA PTU, and PAT PTU. Changing the location of the SzPUFA OrfA PTU on the binary construct is completed to reduce fragmentation and rearrangement in isolated transgenic events

Construction of pDAB9151

[0407] The pDAB9151 plasmid (FIG. 43; SEQ ID NO:63) was constructed using a multi-site Gateway L-R recombination reaction. pDAB9151 contains three PUFA synthase PTUs, one phosphopantetheinyl transferase PTU and a phosphinothricin acetyl transferase PTU. Specifically, the first PUFA synthase PTU contains the PvDlec2 promoter v2, 2S 5′ UTR, SzPUFA OrfB v3 and At2S SSP terminator v1. The second PUFA synthase PTU contains the PvDlec2 promoter v2, 2S 5′ UTR, hSzThPUFA OrfC v3 and At2S SSP terminator v1. The phosphopantetheinyl transferase PTU contains the PvDlec2 promoter v2, 2S 5′ UTR, NoHetI v3 and At2S SSP terminator v1. The final PUFA synthase PTU contains the PvDlec2 promoter v2, 2S 5′ UTR, SzPUFA OrfA v3 and At2S SSP terminator v1.

[0408] Plasmids pDAB9148, pDAB7335, pDAB9149, pDAB9150 and pDAB7333 were recombined to form pDAB9151. Specifically, the four PTUs described above were placed in a head-to-tail orientation within the T-strand DNA border regions of the plant transformation binary pDAB7333. The order of the genes is: hSzThPUFA OrfC v3, SzPUFA OrfB v3, NoHetI v3, SzPUFA OrfA v3. pDAB7333 also contains the phosphinothricin acetyl transferase PTU: CsVMV promoter v2, PAT v5, AtuORF1 3′UTR v4 in addition to other regulatory elements such as Overdrive and T-stand border sequences (T-DNA Border A and T-DNA Border B). Recombinant plasmids containing the five PTUs were then isolated and tested for incorporation of the five PTUs with restriction enzyme digestion and DNA sequencing.

### Change the Transcriptional Direction of the Binary Construct PTUs to Introduce Construct Diversity

[0409] An alternative construct design includes changing the order of PUFA synthase PTUs and the transcriptional direction of the gene expression cassettes. In the first series of completed constructs, each gene expression cassette was positioned in the same direction (“head to tail,” wherein the promoter of one gene expression cassette is located adjacent to the 3′UTR of a second gene expression cassette). The following constructs describe a strategy wherein, gene expression cassettes are positioned in different directions, and utilize alternative promoters. In these examples, the gene expression cassette is located in trans to a second gene expression cassette such that the promoters of both gene expression cassettes are engineered adjacent to one another. This configuration is described as a “head-to-head” configuration. Other configurations are described in the examples, wherein one gene expression cassettes is located in trans to a second gene expression cassette such that the 3′UTRs of both gene expression cassettes are engineered adjacent to one another. This configuration is described as a “tail-to-tail” configuration. To mitigate potential read-through of such a design, the bidirectional Orf 23/24 terminator has been placed between these two PTUs. These configurations are proposed to increase expression of the transgenes, thereby resulting in higher concentrations and content of LC-PUFA and DHA fatty acid.

Construction of pDAB108207

[0410] The pDAB108207 plasmid (FIG. 44; SEQ ID NO:64) was constructed using a multi-site Gateway L-R recombination reaction. pDAB108207 contains three PUFA synthase PTUs, one phosphopantetheinyl transferase PTU and a phosphinothricin acetyl transferase PTU. Specifically, the first PUFA synthase PTU contains the PvDlec2 promoter v2, 2S 5′ UTR, SzPUFA OrfA v3 and At2S SSP terminator v1. The phosphopantetheinyl transferase PTU contains the PvPhas promoter v6, PvPhas 5′ UTR, NoHetI v3, PvPhas 3′ UTR v1 and PvPhas 3′ MAR v2 (unannotated on the plasmid map). The second PUFA synthase PTU contains the PvDlec2 promoter v2, 2S 5′ UTR, hSzThPUFA OrfC v3, At2S SSP terminator v1 and AtuORF23 3′ UTR v1. The third PUFA synthase PTU contains the PvPhas promoter v6, PvPhas 5′ UTR, SzPUFA OrfB v3, PvPhas 3′ UTR and PvPhas 3′ MAR v2 (unannotated on the plasmid map) and AtuORF23 3′ UTR v1.

[0411] Plasmids pDAB7334, pDAB101489, pDAB108205, pDAB108206 and pDAB7333 were recombined to form pDAB108207. Specifically, the SzPUFA OrfA v3 and NoHetI v3 are placed in a tail-to-tail orientation; NoHetI v3 and hSzThPUFA OrfC v3 are placed in a head-to-head orientation; hSzThPUFA OrfC v3 and SzPUFA OrfB are placed in a tail-to-tail orientation within the T-strand DNA border regions of the plant transformation binary pDAB7333. The order of the genes is: SzPUFA OrfA v3, NoHetI v3, hSzThPUFA OrfC v3, SzPUFA OrfB v3. pDAB7333 also contains the phosphinothricin acetyl transferase PTU: CsVMV promoter v2, PAT v5, AtuORF1 3′UTR v4 in addition to other regulatory elements such as Overdrive and T-stand border sequences (T-DNA Border A and T-DNA Border B). Recombinant plasmids containing the five PTUs were then isolated and tested for incorporation of the five PTUs with restriction enzyme digestion and DNA sequencing.

Construction of pDAB108208

[0412] The pDAB108208 plasmid (FIG. 45; SEQ ID NO:65) was constructed using a multi-site Gateway L-R recombination reaction. pDAB108208 contains three PUFA synthase PTUs, one phosphopantetheinyl transferase PTU and a phosphinothricin acetyl transferase PTU. Specifically, the first PUFA synthase PTU contains the PvDlec2 promoter v2, 2S 5′ UTR, SzPUFA OrfA v3 and At2S SSP terminator v1. The phosphopantetheinyl transferase PTU contains the PvPhas promoter v4, PvPhas 5′ UTR, NoHetI v3 and AtuORF23 3′ UTR v1. The second PUFA synthase PTU contains the PvDlec2 promoter v2, 2S 5′ UTR, hSzThPUFA OrfC v3 and At2S SSP terminator v1. The third PUFA synthase PTU contains the PvPhas promoter v5, PvPhas 5′ UTR, SzPUFA OrfB v3, PvPhas 3′ UTR, PvPhas 3′ MAR v2 (unannotated on the plasmid map), and AtuORF23 3′ UTR v1.

[0413] Plasmids pDAB108200, pDAB101490, pDAB108201, pDAB108202 and pDAB7333 were recombined to form pDAB108208. Specifically, the SzPUFA OrfA v3 and NoHetI v3 are placed in a head-to-head orientation; NoHetI v3 and hSzThPUFA OrfC v3 are placed in a tail-to-tail orientation; hSzThPUFA OrfC v3 and SzPUFA OrfB are placed in a head-to-head orientation within the T-strand DNA border regions of the plant transformation binary pDAB7333. The order of the genes is: SzPUFA OrfA v3, NoHetI v3, hSzThPUFA OrfC v3, SzPUFA OrfB v3. pDAB7333 also contains the phosphinothricin acetyl transferase PTU: CsVMV promoter v2, PAT v5, AtuORF1 3′UTR v4 in addition to other regulatory elements such as Overdrive and T-stand border sequences (T-DNA Border A and T-DNA Border B). Recombinant plasmids containing the five PTUs were then isolated and tested for incorporation of the five PTUs with restriction enzyme digestion and DNA sequencing.

Construction of pDAB108209

[0414] The pDAB108209 plasmid (FIG. 46; SEQ ID NO:66) was constructed using a multi-site Gateway L-R recombination reaction. pDAB108209 contains three PUFA synthase PTUs, one phosphopantetheinyl transferase PTU and a phosphinothricin acetyl transferase PTU. Specifically, the first PUFA synthase PTU contains the PvDlec2 promoter v2, 2S 5′ UTR, SzPUFA OrfA v3 and At2S SSP terminator v1. The phosphopantetheinyl transferase PTU contains the PvPhas promoter v4, PvPhas 5′ UTR, NoHetI v3 and AtuORF23 3′ UTR v1. The second PUFA synthase PTU contains the PvDlec2 promoter v2, 2S 5′ UTR, hSzThPUFA OrfC v3 and At2S SSP terminator v1. The third PUFA synthase PTU contains the PvPhas promoter v5, PvPhas 5′ UTR, SzPUFA OrfB v3, PvPhas 3′ UTR and PvPhas 3′ MAR v2 (unannotated on the plasmid map), and random DNA spacer.

[0415] Plasmids pDAB108200, pDAB108204, pDAB108201, pDAB108202 and pDAB7333 were recombined to form pDAB108209. Specifically, the SzPUFA OrfA v3 and NoHetI v3 are placed in a head-to-head orientation; NoHetI v3 and hSzThPUFA OrfC v3 are placed in a tail-to-tail orientation; hSzThPUFA OrfC v3 and SzPUFA OrfB are placed in a head-to-head orientation within the T-strand DNA border regions of the plant transformation binary pDAB7333. The order of the genes is: SzPUFA OrfA v3, NoHetI v3, hSzThPUFA OrfC v3, SzPUFA OrfB v3. pDAB7333 also contains the phosphinothricin acetyl transferase PTU: CsVMV promoter v2, PAT v5, AtuORF1 3′ UTR v4 in addition to other regulatory elements such as Overdrive and T-stand border sequences (T-DNA Border A and T-DNA Border B). Recombinant plasmids containing the five PTUs were then isolated and tested for incorporation of the five PTUs with restriction enzyme digestion and DNA sequencing.

### Doubling 3′UTRs and Including Spacer DNA to Minimize Transcriptional Interference.

[0416] Transcriptional interference can occur when multiple genes are stacked in a series thereby resulting in reduced expression of the downstream genes. This phenomenon results from transcriptional read-through of the 3′UTR and terminator into the next promoter-transcription unit. Alternative construct designs consisting of two strategies to minimize transcriptional interference and transcriptional interference are described. The first strategy deploys the use of two terminator/3′UTRs which are stacked between individual DHA gene expression cassettes to limit read-through into the next gene expression cassette. The second strategy inserts about one-thousand base pairs of spacer DNA between gene expression cassettes, thereby minimizing transcriptional interference.

Construction of pDAB108207

[0417] The pDAB108207 plasmid (FIG. 44; SEQ ID NO:64) was constructed using a multi-site Gateway L-R recombination reaction. pDAB108207 contains three PUFA synthase PTUs, one phosphopantetheinyl transferase PTU and a phosphinothricin acetyl transferase PTU. Specifically, the first PUFA synthase PTU contains the PvDlec2 promoter v2, 2S 5′ UTR, SzPUFA OrfA v3 and At2S SSP terminator v1. The second PUFA synthase PTU contains the PvPhas promoter v3, PvPhas 5′ UTR, SzPUFA OrfB v3, PvPhas 3′ UTR, PvPhas 3′ MAR v2 (unannotated on the plasmid map), and AtuORF23 3′ UTR v1. The third PUFA synthase PTU contains the PvDlec2 promoter v2, 2S 5′ UTR, hSzThPUFA OrfC v3, At2S SSP terminator v1 and AtuORF23 3′ UTR v1. The phosphopantetheinyl transferase PTU contains the PvPhas promoter v6, PvPhas 5′ UTR, NoHetI v3, PvPhas 3′ UTR v1 and PvPhas 3′ MAR v2 (unannotated on the plasmid map).

[0418] Plasmids pDAB7334, pDAB101489, pDAB108205, pDAB108206 and pDAB7333 were recombined to form pDAB108207. Specifically, the SzPUFA OrfA v3 and NoHetI v3 are placed in a tail-to-tail orientation and an AtuORF23 3′UTR is placed between the two PTUs; NoHetI v3 and hSzThPUFA OrfC v3 are placed in a head-to-head orientation; hSzThPUFA OrfC v3 and SzPUFA OrfB are placed in a head-to-tail orientation and an AtuORF23 3′UTR is placed between the two PTUs within the T-strand DNA border regions of the plant transformation binary pDAB7333. The order of the genes is: SzPUFA OrfA v3, NoHetI v3, hSzThPUFA OrfC v3, SzPUFA OrfB v3. pDAB7333 also contains the phosphinothricin acetyl transferase PTU: CsVMV promoter v2, PAT v5, AtuORF1 3′UTR v4 in addition to other regulatory elements such as Overdrive and T-stand border sequences (T-DNA Border A and T-DNA Border B). Recombinant plasmids containing the five PTUs were then isolated and tested for incorporation of the five PTUs with restriction enzyme digestion and DNA sequencing.

Construction of pDAB108208

[0419] The pDAB108208 plasmid (FIG. 45; SEQ ID NO:65) was constructed using a multi-site Gateway L-R recombination reaction. pDAB108208 contains three PUFA synthase PTUs, one acyl-CoA synthetase PTU, one phosphopantetheinyl transferase PTU and a phosphinothricin acetyl transferase PTU. Specifically, the first PUFA synthase PTU contains the PvDlec2 promoter v2, 2S 5′ UTR, SzPUFA OrfA v3 and At2S SSP terminator v1. The second PUFA synthase PTU contains the PvPhas promoter v5, PvPhas 5′ UTR, SzPUFA OrfB v3, PvPhas 3′ UTR, PvPhas 3′ MAR v2 (unannotated on the plasmid map) and AtuORF23 3′ UTR v1. The third PUFA synthase PTU contains the PvDlec2 promoter v2, 2S 5′ UTR, hSzThPUFA OrfC v3 and At2S SSP terminator v1. The phosphopantetheinyl transferase PTU contains the PvPhas promoter v4, PvPhas 5′ UTR, NoHetI v3 and AtuORF23 3′ UTR v1.

[0420] Plasmids pDAB108200, pDAB101490, pDAB108201, pDAB108202 and pDAB7333 were recombined to form pDAB108208. Specifically, the SzPUFA OrfA v3 and NoHetI v3 are placed in a head-to-head orientation; NoHetI v3 and hSzThPUFA OrfC v3 are placed in a tail-to-tail orientation and an AtuORF23 3′UTR is placed between the two PTUs; hSzThPUFA OrfC v3 and SzPUFA OrfB are placed in a head-to-head orientation within the T-strand DNA border regions of the plant transformation binary pDAB7333. The order of the genes is: SzPUFA OrfA v3, NoHetI v3, hSzThPUFA OrfC v3, SzPUFA OrfB v3. pDAB7333 also contains the phosphinothricin acetyl transferase PTU: CsVMV promoter v2, PAT v5, AtuORF1 3′UTR v4 in addition to other regulatory elements such as Overdrive and T-stand border sequences (T-DNA Border A and T-DNA Border B). Recombinant plasmids containing the five PTUs were then isolated and tested for incorporation of the five PTUs with restriction enzyme digestion and DNA sequencing.

Construction of pDAB108209

[0421] The pDAB108209 plasmid (FIG. 46; SEQ ID NO:66) was constructed using a multi-site Gateway L-R recombination reaction. pDAB108209 contains three PUFA synthase PTUs, one acyl-CoA synthetase PTU, one phosphopantetheinyl transferase PTU and a phosphinothricin acetyl transferase PTU. Specifically, the first PUFA synthase PTU contains the PvDlec2 promoter v2, 2S 5′ UTR, SzPUFA OrfA v3 and At2S SSP terminator v1. The second PUFA synthase PTU contains the PvPhas promoter v5, PvPhas 5′ UTR, SzPUFA OrfB v3, PvPhas 3′ UTR, PvPhas 3′ MAR v2 (unannotated on the plasmid map), and random DNA spacer. The third PUFA synthase PTU contains the PvDlec2 promoter v2, 2S 5′ UTR, hSzThPUFA OrfC v3 and At2S SSP terminator v1. The phosphopantetheinyl transferase PTU contains the PvPhas promoter v4, PvPhas 5′ UTR, NoHetI v3 and AmORF23 3′ UTR v1.

[0422] Plasmids pDAB108200, pDAB108204, pDAB108201, pDAB108202 and pDAB7333 were recombined to form pDAB108209. Specifically, the SzPUFA OrfA v3 and NoHetI v3 are placed in a head-to-head orientation; NoHetI v3 and hSzThPUFA OrfC v3 are placed in a tail-to-tail orientation and a one-thousand base pair spacer is placed between the two PTUs; hSzThPUFA OrfC v3 and SzPUFA OrfB are placed in a head-to-head orientation within the T-strand DNA border regions of the plant transformation binary pDAB7333. The order of the genes is: SzPUFA OrfA v3, NoHetI v3, hSzThPUFA OrfC v3, SzPUFA OrfB v3. pDAB7333 also contains the phosphinothricin acetyl transferase PTU: CsVMV promoter v2, PAT v5, AtuORF1 3′UTR v4 in addition to other regulatory elements such as Overdrive and T-stand border sequences (T-DNA Border A and T-DNA Border B). Recombinant plasmids containing the five PTUs were then isolated and tested for incorporation of the five PTUs with restriction enzyme digestion and DNA sequencing.

### Using Alternative 3′UTR-Terminator to Limit Transcriptional Read-Through.

[0423] Due to a limited number of proprietary 3′UTR-terminators the Agrobacterium ORF 23 3′UTR-terminator is primarily used to terminate transcription. It was recently shown the ZmLipase 3′UTR-terminator is more effective in terminating transcriptional read-through in Arabidopsis thaliana. As such, one version of constructs utilize the ZmLipase 3′UTR-terminator in combination with the PvDlec2 promoter to test if this 3′ UTR can reduce transcriptional read-through of upstream genes, thereby reducing transcriptional interference.

Construction of pDAB9159

[0424] The pDAB9159 plasmid (FIG. 47; SEQ ID NO:67) was constructed using a multi-site Gateway L-R recombination reaction. pDAB9159 contains three PUFA synthase PTUs, one phosphopantetheinyl transferase PTU and a phosphinothricin acetyl transferase PTU. Specifically, the first PUFA synthase PTU contains the PvDlec2 promoter v2, 2S 5′ UTR, SzPUFA OrfA v3 and ZmLip 3′ UTR v1. The second PUFA synthase PTU contains the PvPhas promoter v3, PvPhas 5′ UTR, SzPUFA OrfB v3 and ZmLip 3′ UTR v1. The third PUFA synthase PTU contains the PvDlec2 promoter v2, 2S 5′ UTR, hSzThPUFA OrfC v3 and ZmLip 3′ UTR v1. The phosphopantetheinyl transferase PTU contains the PvPhas promoter v3, PvPhas 5′ UTR, NoHetI v3 and ZmLip 3′ UTR v1.

[0425] Plasmids pDAB9152, pDAB9153, pDAB9154, pDAB9155 and pDAB7333 were recombined to form pDAB9159. Specifically, the four PTUs described above were placed in a head-to-tail orientation within the T-strand DNA border regions of the plant transformation binary pDAB7333. The order of the genes is: SzPUFA OrfA v3, SzPUFA OrfB v3, hSzThPUFA OrfC v3, NoHetI v3. pDAB7333 also contains the phosphinothricin acetyl transferase PTU: CsVMV promoter v2, PAT v5, AtuORF1 3′UTR v4 in addition to other regulatory elements such as Overdrive and T-stand border sequences (T-DNA Border A and T-DNA Border B). Recombinant plasmids containing the five PTUs were then isolated and tested for incorporation of the five PTUs with restriction enzyme digestion and DNA sequencing.

Construction of pDAB9147

[0426] The pDAB9147 plasmid (FIG. 48; SEQ ID NO:68) was constructed using a multi-site Gateway L-R recombination reaction. pDAB9147 contains three PUFA synthase PTUs, one phosphopantetheinyl transferase PTU and a phosphinothricin acetyl transferase PTU. Specifically, the first PUFA synthase PTU contains the PvDlec2 promoter v2, 2S 5′ UTR, SzPUFA OrfA v3, At2S SSP terminator v1 and ZmLip 3′ UTR v1. The second PUFA synthase PTU contains the PvDlec2 promoter v2, 2S 5′ UTR, SzPUFA OrfB v3 and At2S SSP terminator v1. The third PUFA synthase PTU contains the PvDlec2 promoter v2, 2S 5′ UTR, hSzThPUFA OrfC v3 and At2S SSP terminator v1. The phosphopantetheinyl transferase PTU contains the PvDlec2 promoter v2, 2S 5′ UTR, NoHetI v3 and At2S SSP terminator v1.

[0427] Plasmids pDAB9146, pDAB7335, pDAB7336, pDAB7338 and pDAB7333 were recombined to form pDAB9147. Specifically, the four PTUs described above were placed in a head-to-tail orientation within the T-strand DNA border regions of the plant transformation binary pDAB7333. The order of the genes is: SzPUFA OrfA v3, SzPUFA OrfB v3, hSzThPUFA OrfC v3, NoHetI v3. pDAB7333 also contains the phosphinothricin acetyl transferase PTU: CsVMV promoter v2, PAT v5, AtuORF1 3′UTR v4 in addition to other regulatory elements such as Overdrive and T-stand border sequences (T-DNA Border A and T-DNA Border B). Recombinant plasmids containing the five PTUs were then isolated and tested for incorporation of the five PTUs with restriction enzyme digestion and DNA sequencing.

### Delivery of DHA Genes on Two Separate T-DNAs.

[0428] An alternative construct design consists of constructing two separate binary vectors, the first vector containing a sub-set of PUFA synthase genes on one T-DNA, and the second binary vector containing the remaining PUFA synthase genes on a second T-DNA. These binary vectors are individually used to transform plants which are sexually crossed, thereby resulting in progeny which contain all of the PUFA synthase gene expression constructs. An alternative method to produce transgenic plants would be to co-transform both binary vectors into canola tissue, and select or screen for a single plant which contain both T-strands.

Construction of pDAB108224

[0429] The pDAB108224 plasmid (FIG. 49; SEQ ID NO:69) was constructed using a multi-site Gateway L-R recombination reaction. pDAB108224 contains one PUFA synthase PTU, one phosphopantetheinyl transferase PTU and a phosphinothricin acetyl transferase PTU. Specifically, the first PUFA synthase PTU contains the PvDlec2 promoter v2, 2S 5′ UTR, SzPUFA OrfA v3 and At2S SSP terminator v1. The phosphopantetheinyl transferase PTU contains the PvPhas promoter v4, PvPhas 5′ UTR, NoHetI v3 and AtuORF23 3′ UTR v1.

[0430] Plasmids pDAB108216, pDAB108221 and pDAB7333 were recombined to form pDAB108224. Specifically, the SzPUFA OrfA v3 and NoHetI v3 are placed in a head-to-head orientation within the T-strand DNA border regions of the plant transformation binary pDAB7333. The order of the genes is: SzPUFA OrfA v3, NoHetI v3. pDAB7333 also contains the phosphinothricin acetyl transferase PTU: CsVMV promoter v2, PAT v5, AtuORF1 3′UTR v4 in addition to other regulatory elements such as Overdrive and T-stand border sequences (T-DNA Border A and T-DNA Border B). Recombinant plasmids containing the five PTUs were then isolated and tested for incorporation of the three PTUs with restriction enzyme digestion and DNA sequencing.

Construction of pDAB108225

[0431] The pDAB108225 plasmid (FIG. 50; SEQ ID NO:70) was constructed using a multi-site Gateway L-R recombination reaction. pDAB108225 contains two PUFA synthase PTUs and a phosphinothricin acetyl transferase PTU. Specifically, the first PUFA synthase PTU contains the PvDlec2 promoter v2, 2S 5′ UTR, SzPUFA OrfB v3 and At2S SSP terminator v1. The second PUFA synthase PTU contains the PvPhas promoter v4, SzPUFA OrfB v3 and Atu ORF23 3′ UTR v1.

[0432] Plasmids pDAB108217, pDAB108222 and pDAB7333 were recombined to form pDAB108225. Specifically, the SzPUFA OrfB v3 and hSzThPUFA OrfC v3 are placed in a head-to-head orientation within the T-strand DNA border regions of the plant transformation binary pDAB7333. The order of the genes is: SzPUFA OrfB v3, hSzThPUFA OrfC v3. pDAB7333 also contains the phosphinothricin acetyl transferase PTU: CsVMV promoter v2, PAT v5, AtuORF1 3′UTR v4 in addition to other regulatory elements such as Overdrive and T-stand border sequences (T-DNA Border A and T-DNA Border B). Recombinant plasmids containing the five PTUs were then isolated and tested for incorporation of the three PTUs with restriction enzyme digestion and DNA sequencing.

Canola Transformation with Constructs Containing Alternative Designs

[0433] These plasmids are used to stably transform canola plants using the protocols described above. Transgenic canola plants are isolated and molecularly characterized. The use of alternative constructs result in canola plants which contain greater amounts of DHA and LC-PUFAs. The resulting LC-PUFA accumulation is determined and canola plants which produce 0.01% to 15% DHA or 0.01% to 15% LC-PUFA are identified.

### Example 18

### Alternative Construct Designs Used for Transformation of Arabidopsis thaliana and Subsequent Production of LC-PUFA and DHA

[0434] Arabidopsis thaliana plants were transformed with Agrobacterium tumefaciens strains containing the pDAB101493, pDAB7362, pDAB7369, pDAB101412, or pDAB7380 binary vectors. A floral dipping transformation protocol described by Clough and Bent (1998) was used for the transformation. Clough and Bent, “Floral dip: a simplified method for agrobacterium-mediated transformation of Arabidopsis thalia,” Plant J., 16:735-743, 1998. Transformed Arabidopsis plants were obtained and molecular confirmation of the transgene presence was completed. T₁ plants from the transgenic Arabidopsis events were grown to maturity in the greenhouse. These plants were self-fertilized and the resulting T₂ seed harvested at maturity. Single seeds were analyzed via FAMEs GC-FID to determine the LC-PUFA and DHA content in the T₂ Arabidopsis seed. The tissue was analyzed via the FAMEs GC-FID method as described in the previous examples. Single T₂ seeds from a T₁ plant of the Arabidopsis plants contained from 0.00% to 0.95% DHA and 0.00% to 1.50% total LC-PUFA. The LC-PUFA and DHA content of each T₂ seed from the individual T₁ plants is shown in FIG. 51.

### Example 19

### Transformation of a “Non-High Oleic” Canola Variety (DH12075) with the PUFA Synthase Gene Set

[0435] Brassica napus variety DH12075 was transformed by the hypocotyl transformation method essentially as described in Example 4 using Agrobacterium tumefaciens harboring plasmid pDAB7362. Unlike the Nexera 710 genetic background, DH12075 is not a “high oleic” variety. T₀ DH12075 plants that were positive for the presence of the pat gene were recovered and analyzed for presence of all five of the DHA gene set (PUFA synthase OrfA, PUFA synthase OrfB, PUFA synthase chimeric OrfC, acyl-CoA synthetase and 4′ phosphopantetheinyl transferase HetI) by the molecular analysis methods described in Example 5. Event 001-2009-006DH (Event 006) was identified as a T₀ plant containing all five DHA genes. It was grown to maturity in the growth chamber and T₁ seed harvested. Analysis of single T₁ seeds of Event 006 by the methods described in Example 6 showed that 31 of 48 seeds analyzed contained DHA with levels between 0.19% and 0.86% DHA. 113 T₁ seeds were planted, grown in growth chamber and leaf tissue samples analyzed by the methods described in Example 4 to determine the zygosity of individual plants. 23 plants were determined by qPCR analysis to be homozygous for the PAT gene and also showed cosegregation of the five DHA genes, indicating the presence of a single locus. Southern analysis of Event 006 T₁ plant tissue using pat and OrfA probes indicated that there was one additional copy of the OrfA gene present. The homozygous plants were grown to maturity and seed harvested. FAME analysis of bulk T₂ seed samples from each of these plants showed that 17 of 23 homozygous T₂ plants produced LC-PUFAs with DHA contents between 0.17 and 0.72%. Five T₂ seed samples contained EPA between 0.08% and 0.16%, and the total LC-PUFA (DHA+EPA+DPA[n-6]) of the LC-PUFA-producing events was between 0.33% and 1.35%. Table 22a shows the complete fatty acid profile of two of the DHA-containing bulk T₂ samples of Event 006. Single seed analysis was performed on 48 individual T₂ seeds from eight of the homozygous T₁ lines and the average DHA content of these seeds are shown in Table 23. Single T₂ seeds with DHA content of up to 1.31% were detected. Table 22b shows the complete fatty acid profile of four DHA-containing T₂ seeds. These data show that DHA can be produced in canola with genetic backgrounds having oleic acid contents of less than 72% via transformation with the PUFA synthase gene set.

TABLE 22
Complete FAME profiles of T₂ seeds from Event 006 in DH12075 genetic background

| | | | | | | C18:1 | | |
|---|---|---|---|---|---|---|---|---|
| | C14:0 | C16:0 | C16:1 | C18:0 | C18:1 | (n-7) | C18:2 | C18:3 |
| a. Bulk T2 | | | | | | | | |
| seed analysis | | | | | | | | |
| Event 006-033 | 0.08 | 3.51 | 0.14 | 2.49 | 70.21 | 1.27 | 11.39 | 6.36 |
| Event 006-002 | 0.08 | 3.99 | 0.16 | 2.10 | 69.52 | 1.28 | 12.56 | 5.85 |
| b. Single T2 | | | | | | | | |
| seed analysis | | | | | | | | |
| Event 006-019 | 0.00 | 3.88 | 0.28 | 2.42 | 68.75 | 0.00 | 13.43 | 5.88 |
| #32 | | | | | | | | |
| Event 006-012 | 0.00 | 3.53 | 0.18 | 3.55 | 68.41 | 2.24 | 11.04 | 5.11 |
| #7 | | | | | | | | |
| Event 006-033 | 0.00 | 3.22 | 0.31 | 3.17 | 71.02 | 1.69 | 8.57 | 5.25 |
| #43 | | | | | | | | |
| Event 006-004 | 0.00 | 4.02 | 0.26 | 0.95 | 46.04 | 3.13 | 27.43 | 12.75 |
| #20 | | | | | | | | |
| | | | | | | | C22:5 | |
| | C20:0 | C20:1 | C22:0 | C22:1 | C20:5 | C24:0 | (n-6) | C22:6 |
| a. Bulk T2 | | | | | | | | |
| seed analysis | | | | | | | | |
| Event 006-033 | 0.81 | 1.31 | 0.40 | 0.23 | 0.15 | 0.32 | 0.64 | 0.70 |
| Event 006-002 | 0.85 | 1.35 | 0.52 | 0.00 | 0.00 | 0.39 | 0.63 | 0.72 |
| b. Single T2 | | | | | | | | |
| seed analysis | | | | | | | | |
| Event 006-019 | 0.93 | 1.19 | 0.61 | 0.00 | 0.00 | 0.72 | 0.77 | 1.15 |
| #32 | | | | | | | | |
| Event 006-012 | 1.05 | 1.43 | 0.41 | 0.25 | 0.00 | 0.49 | 1.00 | 1.31 |
| #7 | | | | | | | | |
| Event 006-033 | 1.00 | 1.26 | 0.62 | 0.00 | 0.00 | 1.44 | 1.15 | 1.31 |
| #43 | | | | | | | | |
| Event 006-004 | 0.72 | 1.23 | 0.49 | 0.00 | 0.00 | 0.87 | 0.80 | 1.30 |
| #20 | | | | | | | | |

TABLE 23
Average DHA content of T₂ seeds from eight homozygous Event 006 T₁
canola plants in the DH12075 genetic background (48 seeds per plant
were analyzed).

| | Average | Average Total | | |
|---|---|---|---|---|
| | DHA | LC-PUFA | Minimum | Maximum |
| T₁ plant ID | content | content | DHA content | DHA content |
| Event 006-002 | 0.68% | 1.26% | 0.00% | 1.01% |
| Event 006-004 | 0.52% | 0.91% | 0.00% | 1.30% |
| Event 006-019 | 0.55% | 0.96% | 0.00% | 1.15% |
| Event 006-012 | 0.32% | 0.57% | 0.00% | 1.31% |
| Event 006-014 | 0.68% | 1.28% | 0.00% | 0.91% |
| Event 006-026 | 0.00% | 0.00% | 0.00% | 0.00% |
| Event 006-033 | 0.78% | 1.39% | 0.00% | 1.31% |
| Event 006-037 | 0.47% | 0.85% | 0.00% | 1.01% |

[0436] The foregoing description of the invention has been presented for purposes of illustration and description. Furthermore, the description is not intended to limit the invention to the form disclosed herein.

[0437] All of the various aspects, embodiments, and options described herein can be combined in any and all variations.

[0438] All publications, patents, and patent applications mentioned in this specification are herein incorporated by reference to the same extent as if each individual publication, patent, or patent application was specifically and individually indicated to be incorporated by reference.

1-68. (canceled)

69. A genetically modified Brassica plant, descendant, cell, tissue, seed or part thereof, comprising:
(i) a nucleic acid sequence encoding a polyunsaturated fatty acid (PUFA) synthase system that produces at least one PUFA; and
(ii) a nucleic acid sequence encoding a phosphopantetheinyl transferase (PPTase) that transfers a phosphopantetheinyl cofactor to a PUFA synthase system ACP domain.

70. The genetically modified Brassica plant, descendant, cell, tissue, seed, or part thereof of claim 69, wherein the plant, descendant, cell, tissue, seed, or part thereof is Brassica napus or Brassica juncea.

71. The genetically modified Brassica plant, descendant, cell, tissue, seed, or part thereof of claim 69, wherein the PUFA synthase system comprises an amino acid sequence that is at least 80% identical to the amino acid sequence of SEQ ID NO:1, 2 or 3.

72. The genetically modified Brassica plant, descendant, cell, tissue, seed, or part thereof of claim 69, wherein the nucleic acid sequence encoding the PUFA synthase system comprises a nucleic acid sequence at least 80% identical to the nucleic acid sequence of SEQ ID NO:6, 7 or 8.

73. The genetically modified Brassica plant, descendant, cell, tissue, seed, or part thereof of claim 69, wherein the PUFA synthase system comprises the amino acid sequences of SEQ ID NOs: 1, 2 and 3.

74. The genetically modified Brassica plant, descendant, cell, tissue, seed, or part thereof of claim 69, wherein the PPTase comprises an amino acid sequence that is at least 80% identical to SEQ ID NO:5.

75. The genetically modified Brassica plant, descendant, cell, tissue, seed, or part thereof of claim 69, wherein the nucleic acid sequence encoding the PPTase is at least 80% identical to the nucleic acid sequence of SEQ ID NO:10.

76. The genetically modified Brassica plant, descendant, cell, tissue, seed, or part thereof of claim 69, wherein the nucleic acid sequences of (i) and (ii) are contained in a single recombinant expression vector.

77. The genetically modified Brassica plant, descendant, cell, tissue, seed, or part thereof of claim 69, wherein the nucleic acid sequences of (i) and (ii) are operably linked to a promoter selected from the group consisting of: PvDlec2, LfKCS3 and FAE 1.

78. The genetically modified Brassica plant, descendant, cell, tissue, seed, or part thereof of claim 69, further comprising:
(iii) a nucleic acid sequence encoding an acyl-CoA synthetase (ACoAS) that catalyzes the conversion of long chain PUFA free fatty acids (FFA) to acyl-CoA.

79. The genetically modified Brassica plant, descendant, cell, tissue, seed, or part thereof of claim 78, wherein the ACoAS comprises an amino acid sequence that is at least 80% identical to SEQ ID NO:4.

80. The genetically modified Brassica plant, descendant, cell, tissue, seed, or part thereof of claim 78, wherein the nucleic acid sequence encoding, the ACoAS comprises a nucleic acid sequence that is at least 80% identical to the nucleic acid sequence of SEQ ID NO:9 or SEQ ID NO:34.

81. The genetically modified Brassica plant, descendant, cell, tissue, seed, or part thereof of claim 69, further comprising a nucleic acid sequence encoding an acetyl CoA carboxylase (ACCase) or a nucleic acid sequence encoding a type 2 diacylglycerol acyltransferase (DGAT2).

82. An isolated nucleic acid molecule comprising a nucleic acid sequence selected from SEQ ID NOs:6-10.

83. A recombinant expression vector pDAB7361, pDAB7362 or pDAB7363.

84. The genetically modified Brassica plant, descendant, cell, tissue, seed, or part thereof of claim 69, wherein the plant, descendant, cell, tissue, seed, or part thereof comprises 0.01% to 15% by weight of docosahexaenoic acid (DHA).

85. The genetically modified Brassica plant, descendant, cell, tissue, seed, or part thereof of claim 84, wherein the plant, descendant, cell, tissue, seed, or part thereof comprises 0.01% to 5% by weight of eicosapentaenoic acid (EPA).

86. The genetically modified Brassica plant, descendant, cell, tissue, seed, or part thereof of claim 84, wherein the plant, descendant, cell, tissue, seed, or part thereof comprises 0.01% to 5% by weight docosapentaenoic acid (DPA).

87. An oil obtained from the genetically modified Brassica plant, descendant, cell, tissue, seed, or part thereof of claim 69.

88. A seed obtained from a genetically modified Brassica plant, descendant, cell, tissue, or part thereof of claim 69.

89. A functional food comprising; the oil obtained from the genetically modified Brassica plant, descendant cell, tissue, seed, or part thereof of claim 69.

90. A pharmaceutical product comprising the oil obtained from the genetically modified Brassica plant, descendant, cell, tissue, seed, or part thereof of claim 69.

91. A method to produce an oil comprising at least one PUFA, comprising recovering oil from the genetically modified Brassica plant, descendant, cell, tissue, seed, or part thereof of claim 69.

92. An oil composition from seeds of a Brassica plant comprising about 0.05% to 5% by weight of DHA.

93. The oil composition of claim 92, farther comprising a fatty acid profile of >70% by weight of oleic acid.

94. The oil composition of claim 92, further comprising a fatty acid profile of <3.5% by weight of alpha-linolenic acid.

95. A method to produce the genetically modified Brassica plant, comprising transforming a Brassica plant or plant cell with an expression cassette comprising: (i) a nucleic acid sequence encoding a polyunsaturated fatty acid (PUFA) synthase that produces at least one PUFA; (ii) a nucleic acid sequence encoding an acyl-CoA synthetase (ACoAS) that catalyzes the conversion of long chain PUFA free fatty acids (FFA) to acyl-CoA; and (iii) a nucleic acid sequence encoding a phosphopantetheinyl transferase (PPTase) that activates a PUFA synthase system ACP domain.

The application's sequence listing, which the Patent Office published only in electronic form, follows.

SEQUENCE LISTING (78 sequences)

SEQ ID NO: 1 - protein, 2910 aa, Schizochytrium sp. ATCC_20888
  SzPUFA OrfA v3 protein
  ref <308>: DATABASE ACCESSION NUMBER: GenBank: AF378327
  ref <309>: DATABASE ENTRY DATE: 2007-10-22
MAARLQEQKGGEMDTRIAIIGMSAILPCGTTVRESWETIRAGIDCLSDLPEDRVDVTAYFDPVKTTKDKIYCKRGGFIPEYDFDAREFGLNMFQMEDSDANQTISLLKVKEALQDAGIDALGKEKKNIGCVLGIGGGQKSSHEFYSRLNYVVVEKVLRKMGMPEEDVKVAVEKYKANFPEWRLDSFPGFLGNVTAGRCTNTFNLDGMNCVVDAACASSLIAVKVAIDELLYGDCDMMVTGATCTDNSIGMYMAFSKTPVFSTDPSVRAYDEKTKGMLIGEGSAMLVLKRYADAVRDGDEIHAVIRGCASSSDGKAAGIYTPTISGQEEALRRAYNRACVDPATVTLVEGHGTGTPVGDRIELTALRNLFDKAYGEGNTEKVAVGSIKSSIGHLKAVAGLAGMIKVIMALKHKTLPGTINVDNPPNLYDNTPINESSLYINTMNRPWFPPPGVPRRAGISSFGFGGANYHAVLEEAEPEHTTAYRLNKRPQPVLMMAATPAALQSLCEAQLKEFEAAIKENETVKNTAYIKCVKFGEQFKFPGSIPATNARLGFLVKDAEDACSTLRAICAQFAKDVTKEAWRLPREGVSFRAKGIATNGAVAALFSGQGAQYTHMFSEVAMNWPQFRQSIAAMDAAQSKVAGSDKDFERVSQVLYPRKPYEREPEQDHKKISLTAYSQPSTLACALGAFEIFKEAGFTPDFAAGHSLGEFAALYAAGCVDRDELFELVCRRARIMGGKDAPATPKGCMAAVIGPNAENIKVQAANVWLGNSNSPSQTVITGSVEGIQAESARLQKEGFRVVPLACESAFHSPQMENASSAFKDVISKVSFRTPKAETKLFSNVSGETYPTDAREMLTQHMTSSVKFLTQVRNMHQAGARIFVEFGPKQVLSKLVSETLKDDPSVVTVSVNPASGTDSDIQLRDAAVQLVVAGVNLQGFDKWDAPDATRMQAIKKKRTTLRLSAATYVSDKTKKVRDAAMNDGRCVTYLKGAAPLIKAPEPVVDEAAKREAERLQKELQDAQRQLDDAKRAAAEANSKLAAAKEEAKTAAASAKPAVDTAVVEKHRAILKSMLAELDGYGSVDASSLQQQQQQQTAPAPVKAAAPAAPVASAPAPAVSNELLEKAETVVMEVLAAKTGYETDMIEADMELETELGIDSIKRVEILSEVQAMLNVEAKDVDALSRTRTVGEVVNAMKAEIAGSSAPAPAAAAPAPAKAAPAAAAPAVSNELLEKAETVVMEVLAAKTGYETDMIESDMELETELGIDSIKRVEILSEVQAMLNVEAKDVDALSRTRTVGEVVNAMKAEIAGGSAPAPAAAAPGPAAAAPAPAAAAPAVSNELLEKAETVVMEVLAAKTGYETDMIESDMELETELGIDSIKRVEILSEVQAMLNVEAKDVDALSRTRTVGEVVDAMKAEIAGGSAPAPAAAAPAPAAAAPAPAAPAPAVSSELLEKAETVVMEVLAAKTGYETDMIESDMELETELGIDSIKRVEILSEVQAMLNVEAKDVDALSRTRTVGEVVDAMKAEIAGGSAPAPAAAAPAPAAAAPAPAAPAPAAPAPAVSSELLEKAETVVMEVLAAKTGYETDMIESDMELETELGIDSIKRVEILSEVQAMLNVEAKDVDALSRTRTVGEVVDAMKAEIAGSSASAPAAAAPAPAAAAPAPAAAAPAVSNELLEKAETVVMEVLAAKTGYETDMIESDMELETELGIDSIKRVEILSEVQAMLNVEAKDVDALSRTRTVGEVVDAMKAEIAGGSAPAPAAAAPAPAAAAPAVSNELLEKAETVVMEVLAAKTGYETDMIESDMELETELGIDSIKRVEILSEVQAMLNVEAKDVDALSRTRTVGEVVDAMKAEIAGSSAPAPAAAAPAPAAAAPAPAAAAPAVSSELLEKAETVVMEVLAAKTGYETDMIESDMELETELGIDSIKRVEILSEVQAMLNVEAKDVDALSRTRTVGEVVDAMKAEIAGGSAPAPAAAAPAPAAAAPAVSNELLEKAETVVMEVLAAKTGYETDMIESDMELETELGIDSIKRVEILSEVQAMLNVEAKDVDALSRTRTVGEVVDAMKAEIAGGSAPAPAAAAPASAGAAPAVKIDSVHGADCDDLSLMHAKVVDIRRPDELILERPENRPVLVVDDGSELTLALVRVLGACAVVLTFEGLQLAQRAGAAAIRHVLAKDLSAESAEKAIKEAEQRFGALGGFISQQAERFEPAEILGFTLMCAKFAKASLCTAVAGGRPAFIGVARLDGRLGFTSQGTSDALKRAQRGAIFGLCKTIGLEWSESDVFSRGVDIAQGMHPEDAAVAIVREMACADIRIREVGIGANQQRCTIRAAKLETGNPQRQIAKDDVLLVSGGARGITPLCIREITRQIAGGKYILLGRSKVSASEPAWCAGITDEKAVQKAATQELKRAFSAGEGPKPTPRAVTKLVGSVLGAREVRSSIAAIEALGGKAIYSSCDVNSAADVAKAVRDAESQLGARVSGIVHASGVLRDRLIEKKLPDEFDAVFGTKVTGLENLLAAVDRANLKHMVLFSSLAGFHGNVGQSDYAMANEALNKMGLELAKDVSVKSICFGPWDGGMVTPQLKKQFQEMGVQIIPREGGADTVARIVLGSSPAEILVGNWRTPSKKVGSDTITLHRKISAKSNPFLEDHVIQGRRVLPMTLAIGSLAETCLGLFPGYSLWAIDDAQLFKGVTVDGDVNCEVTLTPSTAPSGRVNVQATLKTFSSGKLVPAYRAVIVLSNQGAPPANATMQPPSLDADPALQGSVYDGKTLFHGPAFRGIDDVLSCTKSQLVAKCSAVPGSDAARGEFATDTDAHDPFVNDLAFQAMLVWVRRTLGQAALPNSIQRIVQHRPVPQDKPFYITLRSNQSGGHSQHKHALQFHNEQGDLFIDVQASVIATDSLAF

SEQ ID NO: 2 - protein, 2059 aa, Schizochytrium sp. ATCC_20888
  SzPUFA OrfB v3 protein
  ref <308>: DATABASE ACCESSION NUMBER: GenBank: AF378328
  ref <309>: DATABASE ENTRY DATE: 2007-10-22
MAARNVSAAHEMHDEKRIAVVGMAVQYAGCKTKDEFWEVLMNGKVESKVISDKRLGSNYRAEHYKAERSKYADTFCNETYGTLDENEIDNEHELLLNLAKQALAETSVKDSTRCGIVSGCLSFPMDNLQGELLNVYQNHVEKKLGARVFKDASHWSEREQSNKPEAGDRRIFMDPASFVAEELNLGALHYSVDAACATALYVLRLAQDHLVSGAADVMLCGATCLPEPFFILSGFSTFQAMPVGTGQNVSMPLHKDSQGLTPGEGGSIMVLKRLDDAIRDGDHIYGTLLGANVSNSGTGLPLKPLLPSEKKCLMDTYTRINVHPHKIQYVECHATGTPQGDRVEIDAVKACFEGKVPRFGTTKGNFGHTLVAAGFAGMCKVLLSMKHGIIPPTPGIDDETKMDPLVVSGEAIPWPETNGEPKRAGLSAFGFGGTNAHAVFEEHDPSNAACTGHDSISALSARCGGESNMRIAITGMDATFGALKGLDAFERAIYTGAHGAIPLPEKRWRFLGKDKDFLDLCGVKATPHGCYIEDVEVDFQRLRTPMTPEDMLLPQQLLAVTTIDRAILDSGMKKGGNVAVFVGLGTDLELYRHRARVALKERVRPEASKKLNDMMQYINDCGTSTSYTSYIGNLVATRVSSQWGFTGPSFTITEGNNSVYRCAELGKYLLETGEVDGVVVAGVDLCGSAENLYVKSRRFKVSTSDTPRASFDAAADGYFVGEGCGAFVLKRETSCTKDDRIYACMDAIVPGNVPSACLREALDQARVKPGDIEMLELSADSARHLKDPSVLPKELTAEEEIGGLQTILRDDDKLPRNVATGSVKATVGDTGYASGAASLIKAALCIYNRYLPSNGDDWDEPAPEAPWDSTLFACQTSRAWLKNPGERRYAAVSGVSETRSCYSVLLSEAEGHYERENRISLDEEAPKLIVLRADSHEEILGRLDKIRERFLQPTGAAPRESELKAQARRIFLELLGETLAQDAASSGSQKPLALSLVSTPSKLQREVELAAKGIPRCLKMRRDWSSPAGSRYAPEPLASDRVAFMYGEGRSPYYGITQDIHRIWPELHEVINEKTNRLWAEGDRWVMPRASFKSELESQQQEFDRNMIEMFRLGILTSIAFTNLARDVLNITPKAAFGLSLGEISMIFAFSKKNGLISDQLTKDLRESDVWNKALAVEFNALREAWGIPQSVPKDEFWQGYIVRGTKQDIEAAIAPDSKYVRLTIINDANTALISGKPDACKAAIARLGGNIPALPVTQGMCGHCPEVGPYTKDIAKIHANLEFPVVDGLDLWTTINQKRLVPRATGAKDEWAPSSFGEYAGQLYEKQANFPQIVETIYKQNYDVFVEVGPNNHRSTAVRTTLGPQRNHLAGAIDKQNEDAWTTIVKLVASLKAHLVPGVTISPLYHSKLVAEAEACYAALCKGEKPKKNKFVRKIQLNGRFNSKADPISSADLASFPPADPAIEAAISSRIMKPVAPKFYARLNIDEQDETRDPILNKDNAPSSSSSSSSSSSSSSSPSPAPSAPVQKKAAPAAETKAVASADALRSALLDLDSMLALSSASASGNLVETAPSDASVIVPPCNIADLGSRAFMKTYGVSAPLYTGAMAKGIASADLVIAAGRQGILASFGAGGLPMQVVRESIEKIQAALPNGPYAVNLIHSPFDSNLEKGNVDLFLEKGVTFVEASAFMTLTPQVVRYRAAGLTRNADGSVNIRNRIIGKVSRTELAEMFMRPAPEHLLQKLIASGEINQEQAELARRVPVADDIAVEADSGGHTDNRPIHVILPLIINLRDRLHRECGYPANLRVRVGAGGGIGCPQAALATFNMGASFIVTGTVNQVAKQSGTCDNVRKQLAKATYSDVCMAPAADMFEEGVKLQVLKKGTMFPSRANKLYELFCKYDSFESMPPAELARVEKRIFSRALEEVWDETKNFYINRLHNPEKIQRAERDPKLKMSLCFRWYLSLASRWANTGASDRVMDYQVWCGPAIGSFNDFIKGTYLDPAVANEYPCVVQINKQILRGACFLRRLEILRNARLSDGAAALVASIDDTYVPAEKL

SEQ ID NO: 3 - protein, 1493 aa, Artificial sequence
  Chimeric PUFA OrfC from Schizochytrium sp. ATCC_20888 and Thraustochytrium
  hSzThPUFA OrfC v3 protein
  ref <302>: TITLE: CHIMERIC PUFA POLYKETIDE SYNTHASE SYSTEMS AND USES THEREOF
  ref <310>: PATENT DOCUMENT NUMBER: US 2008-0022422 A1
  ref <311>: PATENT FILING DATE: 2007-05-16
  ref <312>: PUBLICATION DATE: 2008-01-24
MALRVKTNKKPCWEMTKEELTSGKTEVFNYEELLEFAEGDIAKVFGPEFAVIDKYPRRVRLPAREYLLVTRVTLMDAEVNNYRVGARMVTEYDLPVNGELSEGGDCPWAVLVESGQCDLMLISYMGIDFQNQGDRVYRLLNTTLTFYGVAHEGETLEYDIRVTGFAKRLDGGISMFFFEYDCYVNGRLLIEMRDGCAGFFTNEELDAGKGVVFTRGDLAARAKIPKQDVSPYAVAPCLHKTKLNEKEMQTLVDKDWASVFGSKNGMPEINYKLCARKMLMIDRVTSIDHKGGVYGLGQLVGEKILERDHWYFPCHFVKDQVMAGSLVSDGCSQMLKMYMIWLGLHLTTGPFDFRPVNGHPNKVRCRGQISPHKGKLVYVMEIKEMGFDEDNDPYAIADVNIIDVDFEKGQDFSLDRISDYGKGDLNKKIVVDFKGIALKMQKRSTNKNPSKVQPVFANGAATVGPEASKASSGASASASAAPAKPAFSADVLAPKPVALPEHILKGDALAPKEMSWHPMSKLPGNPTPFFSPSSYPPRAICFIPFPGNPLDNNCKAGEMPLNWYNMSEFMCGKVSNCLGPEFARFDKSNTSRSPAFDLALVTRVVEVTNMEHGKFLNVDCNPSKGTMVGEFDCPQDAWFFDGSCNDGHMPYSIIMEIGLQTSGVLTSVLKAPLTMDKDDILFRNLDASAEMVRPDVDVRGKTIRNVTKCTGYAMLGKMGIHRFTFELSVDGVVFYKGSTSFGWFTPEVFAQQAGLDNGKKTEPWCKTNNTSVRRVEIASAKGKEQLTEKLPDATNAQVLRRSEQCEYLDYLNIAPDSGLHGKGYAHGHKDVNPQDWFFSCHFWFDPVMPGSLGIESMFQLIEAFAVDQNIPGEYNVSNPTFAHAPGKTAWKYRGQLTPKNRAMDCEVHIVSITASPENGGYVDIVADGALWVDGLRVYEAKELRVRVVSAKPQAIPDVQQQPPSAKADPGKTGVALSPTQLRDVLLEVDNPLYLGVENSNLVQFESKPATSSRIVSIKPCSISDLGDKSFMETYNVSAPLYTGAMAKGIASADLVIAAGKRKILGSFGAGGLPMHHVRAALEKIQAALPQGPYAVNLIHSPFDSNLEKGNVDLFLEKGVTVVEASAFMTLTPQVVRYRAAGLSRNADGSVNIRNRIIGKVSRTELAEMFIRPAPEHLLEKLIASGEITQEQAELARRVPVADDIAVEADSGGHTDNRPIHVILPLIINLRNRLHRECGYPAHLRVRVGAGGGVGCPQAAAAALTMGAAFIVTGTVNQVAKQSGTCDNVRKQLSQATYSDICMAPAADMFEEGVKLQVLKKGTMFPSRANKLYELFCKYDSFDSMPPAELERIEKRIFKRALQEVWEETKDFYINGLKNPEKIQRAEHDPKLKMSLCFRWYLGLASRWANMGAPDRVMDYQVWCGPAIGAFNDFIKGTYLDPAVSNEYPCVVQINLQILRGACYLRRLNALRNDPRIDLETEDAAFVYEPTNAL

SEQ ID NO: 4 - protein, 780 aa, Schizochytrium sp. ATCC_20888
  SzACS-2 v3 protein
  ref <302>: TITLE: POLYUNSATURATED FATTY ACID PRODUCTION IN HETEROLOGOUS ORGANISMS USING PUFA POLYKETIDE SYNTHASE SYSTEMS
  ref <310>: PATENT DOCUMENT NUMBER: US 2007-0245431 A1
  ref <311>: PATENT FILING DATE: 2007-03-15
  ref <312>: PUBLICATION DATE: 2007-10-18
MPTPDATAPLNKPSDYAVYHEEDGPFWTADSSGVSRVNFSETGVGSEGVIPALTLIDVFERAVKRGGNRIAFRTENMPTLRRGEEAPDALPLKDWKSWSWKQYKADVHRIARALMDLGVEQHDAVSIFGFNSPEWFLSAVGAVHAGAKIAGIYPSDTPAQVQYKAFHSDTAVAVVENEQCFKKFAEVVEDLPYLKAIVCWDYEATDITREDGSVVEVLTFAEFLKRGDTVEAAALDERISKIEPTMCAALIYTSGTTGRPKAVMISHDNLVFEASAVVPNLGGACTTTAEERILSYLPLSHVAGMMVDIIAPIIATAFHKGRICVCFARPYDLRTGTLGQRLNAVEPTIFLGVPRVWEKIQEKLMAVGAKTTGLKKKLSTAAKKRGLEFQEEQQIGRSGANPGFGPLGIYKKLLGLIKGKLGLTKCKFAFAGAAPMTRETLQYFGALNININEVYGMSECSGAATWSTDKAHEWGTVGYEMPSCEVRVFKIAEDGTKTECPRAADIMHATEEEQGEVCFRGRNIMMGYLANPKLGDDHVAEIEEKNAAAIDSEGWLHSGDKGAISTRGMLKITGRYKELIIGAGGENVAPVPIEDAIKARMPFVSNAMMVGDKRKFMAVLLTLKTVGATGELPGTNKLMGAAADYGETIEDACDNEALIEEITQQLKEIGDDGDVTPSNAARIQKFTILPLDFSVSTDELTATLKLKRSVVADKYEDIIEAFYESKSVFVPYSTVGAYATGGPVDDSVVDGSFKGDFSMIGDDDPDLQNVDVLEAIDEDN

SEQ ID NO: 5 - protein, 237 aa, Nostoc sp. PCC 7120
  NoHetI v3 protein
  ref <308>: DATABASE ACCESSION NUMBER: GenBank: P37695
  ref <309>: DATABASE ENTRY DATE: 1994-10-01
MLQHTWLPKPPNLTLLSDEVHLWRIPLDQPESQLQDLAATLSSDELARANRFYFPEHRRRFTAGRGILRSILGGYLGVEPGQVKFDYESRGKPILGDRFAESGLLFNLSHSQNLALCAVNYTRQIGIDLEYLRPTSDLESLAKRFFLPREYELLRSLPDEQKQKIFFRYWTCKEAYLKATGDGIAKLEEIEIALTPTEPAKLQTAPAWSLLELVPDDNCVAAVAVAGFGWQPKFWHY

SEQ ID NO: 6 - DNA, 8733 bp, Schizochytrium sp. ATCC_20888
  SzPUFA OrfA v3 gene
  ref <308>: DATABASE ACCESSION NUMBER: GenBank: AF378327
  ref <309>: DATABASE ENTRY DATE: 2007-10-22
atggcagcgaggctgcaagagcagaaaggaggtgagatggacacgaggattgcgatcataggcatgagcgccatacttccttgtggaaccacggtgagagagtcatgggagaccataagggctggcattgattgcctgtctgatcttcctgaggatcgtgttgatgtgactgcgtactttgacccagtcaagaccacaaaggacaaaatctactgcaagagaggaggtttcattcctgagtatgactttgatgcgcgtgagtttggtctcaacatgttccagatggaagattctgatgcgaatcagaccatctcacttctcaaggtcaaagaagcacttcaagatgctgggattgatgcacttggaaaggagaagaaaaacataggatgcgtgcttggcattggaggtggacagaagagttcacatgagttctacagcagactcaactatgtggttgtggagaaagtcttgagaaagatggggatgccagaggaagatgtcaaagtggctgtggagaagtacaaagcgaacttcccagaatggagacttgactctttccctggattccttgggaatgtcactgctggcagatgcaccaacacattcaacttggatggcatgaactgcgttgtggatgctgcatgtgcaagctccttgatagcagtcaaggttgcgattgatgaactgctctatggtgactgcgacatgatggtcactggtgcaacctgcacagacaactccattgggatgtacatggctttctcaaagacacctgtgttcagcacggacccaagtgtgagagcgtatgatgagaaaacgaaagggatgctcattggtgagggatcagccatgttggtgctcaaacgttatgcagatgcagtgagggatggtgatgagattcatgctgtgattcgtggttgtgcaagctcaagtgatggcaaagcagctggcatctacactcccacaatcagtggtcaagaggaagccttgagacgtgcatacaatcgtgcctgcgttgaccctgccactgtcactttggttgagggtcatgggactggcactccagttggagataggattgagttgactgcgttgaggaacttgtttgacaaagcgtatggtgaagggaacacagagaaagttgcagttggaagtatcaagtccagtattggtcatttgaaggctgttgctggtcttgctggaatgatcaaggtcatcatggctctcaaacacaagactttgcctggaacgatcaatgtggacaatccacccaatctctatgacaacactcccatcaatgagtcatccctctacatcaacacgatgaacagaccctggttccctccacctggtgttccgagacgtgctggaatatccagctttggctttggaggtgccaactaccatgcagtgttggaagaggctgaaccagagcacacgacagcgtacagactcaacaaacgtccacaaccggtgttgatgatggctgcaactcctgctgcgttgcagagcctttgtgaagctcagctgaaagagtttgaagctgcgatcaaggagaatgagacagtcaagaatactgcctacatcaagtgtgtcaagtttggagaacagttcaagttccctgggagcatacctgcgaccaatgcgagactgggattcttggtcaaagatgcggaggatgcgtgctccacgcttcgtgctatatgtgctcagtttgccaaagatgtgaccaaagaagcgtggaggcttccgagagaaggagtttctttccgtgccaaaggcattgccaccaatggtgctgttgctgcactcttctctggacaaggtgctcagtacacacacatgttcagtgaagttgcgatgaactggcctcagttcagacagtccattgctgcaatggacgctgcacagtccaaggttgctggaagtgacaaagactttgaaagagtctctcaagtcctgtacccaaggaaaccgtacgaacgtgagccagaacaagatcacaagaaaatctcactcacagcatacagccagccgtcaaccctggcatgtgctcttggtgcctttgagattttcaaggaagctggattcactccagactttgcagctggacacagcttgggtgagtttgctgcgctctatgcagctggttgtgttgacagagatgagttgtttgaacttgtttgcagaagggcaaggatcatgggaggcaaagatgcacctgccacacccaaaggttgcatggcagctgtcataggacccaacgcagagaacatcaaggttcaagctgccaacgtctggcttggaaactcaaactctccgtctcagactgtcattactgggtctgttgaagggattcaagctgaaagtgccagattgcagaaggaagggttcagagttgtgcctcttgcttgtgagtctgccttccattctccacagatggaaaatgccagctcagctttcaaagatgtcatatccaaggtttccttccgtacacccaaagcagaaacaaagctcttcagcaatgtttctggagagacctatccgacggatgccagagagatgctcactcaacacatgacctcatctgtgaagttcctgacccaagtgaggaacatgcaccaagctggtgcgagaatctttgttgagtttggaccgaaacaagttctcagcaaacttgtttctgaaaccctcaaagatgacccgtctgttgtcacagtgtctgtgaacccagcttctggcacggactctgacatacagttgagggatgctgcagttcagctggttgtggctggtgtcaatcttcaagggtttgacaagtgggatgctcctgatgccacgaggatgcaagccatcaagaaaaagagaaccacactcagactttcagctgccacctatgtcagtgacaagaccaagaaagtgagggatgctgccatgaacgacggaagatgtgtcacatacctcaagggtgctgcaccactcatcaaggctcctgaacctgtggttgacgaagctgccaagagggaggctgaaaggcttcagaaggagcttcaagacgctcagaggcagcttgacgacgccaaacgtgcagctgcagaagccaactccaaacttgctgctgccaaggaggaagccaagactgctgcagcttcagccaagcctgcagttgacactgctgttgtggagaaacatcgtgccatcctcaagtccatgctggctgagctggatggttatggaagtgttgatgcttcttcccttcagcaacagcaacagcaacagactgctccggcgcctgttaaagccgctgcccctgccgctcccgttgcaagtgctcctgctcccgccgtgtccaacgagttgcttgagaaagctgagacagttgtgatggaggttctcgctgccaagactggatacgaaacagacatgattgaggcggacatggagcttgagactgagttgggaattgacagcatcaagagggttgaaattctttctgaagtccaagctatgcttaacgttgaggcgaaagatgttgatgctctctctaggacgagaacagtgggtgaagttgtcaacgctatgaaggcagaaatcgctggttcttccgctccggcgccggcagctgccgcacctgcaccggctaaagcggctccagctgcagctgcaccagctgtttctaatgagctgctcgaaaaggcagaaactgttgtgatggaagtccttgctgccaaaactggctacgaaactgacatgatagaatcagacatggagcttgagacggagcttggaattgattccatcaagcgtgtggaaatcctcagtgaagtccaagccatgctcaatgtggaagctaaggatgtggatgctctctcaaggaccagaactgtcggtgaggttgtcaatgccatgaaggctgagatagctggaggctccgctcctgcgccggccgctgccgctcctggtcccgctgccgcggctccagctccagctgcagccgctccggccgtctcaaacgaactccttgaaaaagctgagaccgtcgtgatggaggtcttggcagctaaaaccggctatgagactgacatgattgagtctgacatggaattggagacagaacttgggatagacagcatcaaacgtgttgaaatcctcagtgaggtccaagctatgctgaacgtggaagcgaaggatgttgatgctctgtccagaacgaggaccgttggtgaggttgtggatgccatgaaggctgaaattgctggagggtctgcgcccgcgccagctgcagccgctcctgcacccgcagccgcggcacctgctccagctgcacctgcacctgccgtttcttcagaactcttggagaaggctgagacggttgtgatggaggttttggctgcaaagactggctatgagaccgacatgattgaatctgatatggaattggagacagagcttgggatcgattccatcaaaagagtggagatcctgagtgaagtccaagccatgctcaatgttgaagctaaggatgttgatgcactttcaagaacaaggacagtgggtgaggttgtggatgccatgaaggcggagattgctggagggagcgcgcctgcgccagctgccgcggcacctgcaccggcagccgcagctccagctccagctgcaccagcaccggccgcgcccgcgccagctgtttcatccgaactcctggaaaaggccgagacggttgtgatggaggtgctcgcagctaagactggttacgagaccgacatgattgaaagtgacatggagcttgaaaccgagttgggaatagatagcatcaaacgtgttgaaatcttgtctgaggtccaagctatgttgaacgtggaggcaaaagatgtcgatgcgctttcaagaaccagaacagtcggtgaggtcgtggacgccatgaaggctgaaattgccggaagctctgctagtgcgccagctgcagccgcacctgcacctgctgccgcggcacctgctccagctgcagccgctcctgccgtcagcaatgagttgctggagaaagccgaaacagttgtgatggaagtccttgctgcaaaaactggttacgaaacggacatgattgagtcagacatggaattggagaccgaacttggaatagattccatcaagagagtggagatcctctctgaggtgcaagccatgctcaacgttgaggctaaagatgttgatgcactcagtaggacaagaactgtgggggaagttgtcgatgcgatgaaggctgagattgctggaggctctgctcctgcgccggcagctgccgcacctgcacccgcagccgcggcaccagctgtcagcaacgaattgcttgagaaggctgaaacagttgtcatggaagtgctggctgcaaaaaccggctatgagactgacatgattgagtctgacatggaacttgagacggaattgggcattgacagcatcaagcgtgttgagatcctcagtgaagtccaagcaatgctcaatgtggaggctaaggatgtggatgccctctcaaggaccagaacagttggtgaggtcgttgatgcgatgaaggcggagatcgctggaagttccgcgcctgcgccagctgcagccgctcctgcacccgcagccgcggcaccggctccagctgcagccgcaccggccgtctcctcagaactcctggaaaaggctgagacagttgtgatggaagtccttgctgcgaaaactggctatgagaccgacatgattgaatctgacatggaactggagaccgagcttggaattgactccatcaaacgtgttgaaatcctctctgaggttcaagcgatgttgaatgtggaggccaaagatgttgatgctctttccagaacaaggacggtgggagaggtggttgatgccatgaaggctgagatagctgggggttctgctcctgcgccagctgcagccgctcctgctcccgctgccgcggcaccagctgtcagcaacgaactccttgaaaaagctgaaactgttgtgatggaggttttggctgcaaagactggatacgagactgacatgatagagtcagacatggagttggaaacagagcttgggattgatagcatcaagcgtgtggaaatcctttctgaggttcaagccatgctgaacgttgaggccaaagatgtcgatgctttgtcaaggaccagaacggttggagaagtggtcgatgccatgaaggctgagatagctggtggatcagcccctgctccggctgcagccgctcctgcaagtgccggtgctgcaccagctgtgaagattgattcagttcatggtgctgactgtgacgatttgtcactgatgcacgcaaaggtggttgacatcagaaggccagatgaactgattctggaaagaccggagaaccgtccagttcttgtcgttgacgatggctcagagttgacacttgctcttgtgagggtgttgggagcctgtgcagttgtcttgacctttgagggattgcagttggctcagagagctggtgcagctgccattcgtcatgttctggctaaggacctttcagcagaatcagctgagaaggccatcaaagaggctgagcaaagatttggagcgttgggaggcttcataagccagcaagcagaaaggtttgaaccagctgagatactgggtttcacactcatgtgtgcgaagtttgccaaagcctctctctgcactgctgtggctggaggtcgtcctgccttcatcggtgtggctaggcttgacggcagacttggattcacctctcaaggcacttctgacgcactcaagagagcacagcgtggagcgatctttggactctgcaagacaatagggttggagtggtcagaatctgatgtgttcagccgtggtgtggacattgctcaagggatgcacccagaagatgctgcagttgccatagttagggagatggcgtgtgctgacatcagaatcagagaggttgggattggagcaaaccagcaaagatgcacaatcagagctgccaagttggagactgggaaccctcagagacagatagcgaaagacgatgtgcttctggtttctggaggtgctcgtgggatcacacctctttgcatccgtgagatcacgcgtcagattgctggaggcaagtacattctgttgggtcgtagcaaagtttctgcgtctgaaccagcatggtgtgctggcatcactgatgagaaggctgtgcagaaagctgccacccaagagttgaagagggccttcagtgctggtgaaggacccaaacccactccaagggctgtcacgaaacttgtgggatctgttcttggtgctcgtgaagtgagaagctccattgctgccattgaagctctgggtggcaaagcgatctacagctcttgtgatgtgaactctgctgcagatgttgccaaagcagttagggatgcagagtcccagcttggtgccagagttagtggaatcgttcacgcttctggtgtgctccgtgatcgtctcatagagaagaaactccctgacgagtttgatgctgtctttgggaccaaagtcactgggttggagaatcttctggctgcagttgatcgtgccaacctcaaacacatggttctcttcagctcccttgctggtttccacggcaatgttggtcagtctgactatgcgatggcaaacgaagctctcaacaagatgggtttggaacttgcgaaggatgtcagtgtcaagtccatctgctttggtccctgggatggtgggatggtgacacctcaactcaagaaacagtttcaagaaatgggagttcagatcattcctcgtgaaggaggtgctgatacagttgcgaggattgtgttgggatcaagtcctgctgagatccttgttggaaactggaggacaccatccaagaaagttggaagtgacacgatcaccctgcatagaaagatcagtgccaagtccaatcccttcttggaggatcatgtcatacaaggcagaagggtgttgccaatgacccttgctattgggagccttgctgagacctgccttggactcttccctggctactctctctgggccatagatgacgcacagctcttcaaaggtgtcactgttgatggagacgtcaactgtgaagtgaccctcacaccgtccactgctccgagtgggagggtgaatgtccaagcgacgctcaagacgttctcaagtggaaaacttgttccagcctacagagctgtcatagtgttgtccaaccaaggtgctccacctgccaatgcaaccatgcagcctccgagccttgatgcagatcctgctttgcaagggtcagtctatgatggcaagactctctttcatggtcctgcgttcagaggcattgatgacgttctcagctgcaccaagagccagcttgttgccaagtgttctgctgttcctggatcagatgcagccagaggagagtttgcaactgacactgatgcacatgatccctttgtcaatgatcttgcctttcaagcaatgttggtctgggtgaggagaacgctgggacaagctgcactcccgaactccattcagaggatagtccaacacagaccggtcccacaagacaaacccttctacatcaccctcagatccaatcagagtggtggacatagccagcacaaacatgcacttcagttccacaacgaacaaggtgatctcttcattgatgttcaagcctctgtcattgcgacagactcacttgcgttctga

SEQ ID NO: 7 - DNA, 6180 bp, Schizochytrium sp. ATCC_20888
  SzPUFA OrfB v3 gene
  ref <308>: DATABASE ACCESSION NUMBER: GenBank: AF378328
  ref <309>: DATABASE ENTRY DATE: 2007-10-22
atggctgcaaggaacgtgagtgcggctcatgagatgcatgacgagaagaggatagctgttgtgggcatggctgttcagtatgctggatgcaaaacgaaagacgagttctgggaagttctcatgaatggaaaagttgagagcaaagtgatcagcgacaaacgtcttggttcaaattaccgtgctgaacactacaaagctgaaaggagcaagtatgctgacaccttctgcaatgagacatatggaactcttgatgagaacgaaatagacaatgagcatgaactccttttgaaccttgccaaacaagccttggctgaaacatctgtcaaagattcaacaagatgtggcatagtttctggatgcctcagcttcccgatggacaacctccaaggtgaactcttgaatgtgtaccagaaccatgttgagaagaaacttggtgccagagttttcaaagatgcctctcactggtcagaaagagaacagtccaacaaaccagaggctggtgacagaagaatcttcatggaccctgcttcctttgttgctgaggaactcaatcttggcgctctccactactctgttgatgctgcctgtgccactgcgctctatgtgctcagactggcgcaagatcacttggtctctggtgcagctgatgtgatgctttgtggtgcaacatgcctgccggagccgtttttcatactctctgggttctcaaccttccaagccatgcctgttggaacgggtcagaatgtgtccatgccgctgcacaaagattctcaaggattgacccctggtgaaggaggttccatcatggtcctcaaacgtttggatgacgcaatcagagatggagatcacatctatggaacacttttgggagccaatgtcagcaacagtggcactggtctgccacttaaaccccttttgccgtcagagaaaaagtgcctcatggacacctacacacgtatcaatgtgcatccccacaagattcagtatgttgaatgccatgcaactgggactccacaaggtgatcgtgtggaaattgatgctgtgaaggcttgctttgaaggcaaagtcccacgttttggaaccacaaaagggaactttggacacacattggtggcagctgggtttgctggcatgtgcaaagtgcttctctccatgaagcacgggatcattccacccactccgggaatagatgacgaaacgaagatggaccctctggttgtctctggtgaggccattccctggccagaaacgaatggagaaccgaagcgtgctggtctctcagcgtttggatttggtgggaccaatgctcatgctgtctttgaggaacatgacccaagcaatgctgcatgcactggccatgactccatttctgctctctctgcacgttgtggtggtgagtcaaacatgagaatagcaatcactgggatggatgccacttttggtgctttgaaaggattggatgcttttgaaagggccatctacactggtgctcatggtgctataccactcccagaaaagagatggagattcctggggaaagacaaggacttccttgatctttgtggagtcaaagcaacaccgcatggctgttacattgaagatgttgaagttgatttccagaggctgaggactccaatgactcctgaagatatgctcttgcctcaacagcttctggctgtcaccacaattgatagggccatattggactctggcatgaagaaaggtggaaatgtggctgtctttgtggggttggggaccgatcttgaactctaccgtcaccgtgcaagggttgctctcaaggagagagtgaggcctgaagccagcaagaaactcaatgacatgatgcagtacatcaatgattgtgggacaagcacttcttacaccagctacataggcaacttggttgcaacaagggtcagttcacaatggggcttcacgggaccttccttcacaatcacagaaggcaacaattctgtgtacagatgtgctgaacttggcaaatacctcttggaaacgggagaggttgatggggttgtggttgcgggtgttgatctctgtgggagtgctgagaacctttacgtcaagtcaaggcgtttcaaggtgtctacatctgacaccccgagagccagctttgatgcagctgctgatggttactttgttggagagggctgtggtgcatttgtgctcaagcgtgagacaagctgcaccaaggatgacagaatctatgcttgcatggatgccatagttcctggaaatgttccatctgcatgtttgagagaggcattggatcaagccagagtcaagcctggagacatcgagatgttggagctttctgctgattcagcgaggcatttgaaggacccgtctgttctcccaaaggaactcactgctgaggaagagattggcggacttcagacgattcttcgtgacgatgacaagctcccaaggaatgttgcaactggaagtgtcaaggccactgttggtgacactggttatgcttctggtgctgccagtttgattaaggctgcgctttgcatctacaaccgttacctgcccagcaatggagatgactgggatgaacctgcacctgaagcaccctgggacagcacactctttgcgtgccagacctcaagagcttggttgaagaaccctggtgagagacgttatgcggctgtttccggagtcagtgaaaccagaagttgctacagtgtgctgctttctgaagcagagggacactacgagagagagaacagaatcagtttggatgaggaagcacccaagctcattgtgttgagagcagactcccatgaagagattcttggaagattggacaagataagggaaaggttcttgcagcccacgggtgctgcacccagagagtctgaattgaaggcgcaagcccgtaggatctttcttgaactccttggtgagacccttgcccaagatgcagcttcatctggaagtcagaagccccttgctctcagcttggtctccactccatccaagctccagagagaggtggaacttgcggcaaaaggcattccgagatgtctcaagatgagacgtgattggagttcccctgctggaagcagatatgcgcctgagcctttggccagtgacagagttgccttcatgtatggagaaggaaggagcccttactatggcatcacacaagacattcataggatttggcctgaacttcatgaggtcatcaatgagaaaacaaaccgtctctgggctgaaggtgacagatgggtcatgccaagggccagcttcaagagtgagcttgagtcacaacagcaagagtttgacagaaacatgattgaaatgttccgtcttggaatcctcacctcaattgccttcacaaacctggcgagagatgttctcaacatcacgcccaaagcagcctttggactcagtttgggagagatttccatgatctttgctttctccaagaaaaacggtttgataagcgatcagttgacaaaggatttgagagagtcagatgtctggaacaaagctctggctgttgagttcaatgcgctcagagaagcctggggcattccacagtctgtcccaaaagatgagttctggcaaggttacatagtgaggggaacgaaacaagacatagaagcagccatagcaccagactcaaagtatgtgaggttgaccatcatcaatgatgccaacactgctctcatcagtggaaagcctgatgcatgcaaagctgcgattgctcgtcttggtggcaacatccctgcgcttccagtcactcaaggcatgtgtgggcattgcccagaggtgggaccttacaccaaggacatcgcaaagatccacgccaaccttgagttccctgtggttgatggtcttgatctctggactaccataaaccagaagaggcttgtgccaagagccacgggtgccaaagatgaatgggctccttcatcctttggggagtatgctggacagctctatgagaaacaagccaacttccctcagatagttgaaaccatctacaagcagaactatgatgtgtttgttgaagttgggccaaacaatcacagaagcacagcagtgagaaccacgcttggaccacagagaaaccaccttgctggtgccatagacaagcagaacgaggatgcttggacgacaatagtcaagctcgtggcttcattgaaggctcaccttgttcctggagtgaccatcagtccgctctaccactccaagctcgttgcagaggctgaggcttgttatgctgcgctctgtaaaggtgagaaacccaagaaaaacaagtttgtgagaaagattcagttgaatggcagattcaacagcaaggcagaccccatctcctcagcagaccttgcatccttcccacctgcggaccctgcgattgaagctgccatctcttcaaggatcatgaagcctgtggctccgaaattctatgcgcgtctcaacattgatgagcaagatgagaccagagatccgatcttgaacaaggacaatgcgccttccagctccagctcttccagcagttcctcttccagcagttcatctccgtctcctgctccttcagctccagttcagaagaaagctgccccagctgcggagacaaaagctgttgccagtgctgatgcacttcgtagtgccctgcttgatcttgactccatgcttgcgctcagctctgcaagtgcttctggcaaccttgttgagactgcgccatctgatgccagtgtcattgtccctccgtgcaacattgctgatcttggcagcagagctttcatgaaaacttatggtgtttctgcgcctctgtacaccggtgcaatggccaagggaattgcctctgcggacttggtgatcgcagctggaaggcaaggaatccttgcgtcatttggtgctggaggccttccaatgcaagttgtgcgtgagtccattgaaaagattcaagctgccctgcccaatggaccatatgctgtcaacctcatccattctccttttgacagcaaccttgagaagggaaatgttgatctcttcttggaaaagggtgtcacttttgttgaggcttcagccttcatgacgttgacaccgcaagttgtcagatacagagcggctgggttgacgaggaatgcagatgggtcagtcaacataaggaacagaatcattgggaaagtctccagaactgagctggctgaaatgttcatgcgtcctgcacctgagcatcttttgcagaagctcattgcttctggggagatcaatcaagaacaagctgagttggccagacgtgttcctgtggctgatgacattgcggttgaagctgattctggtggacacactgacaaccgtccaatccatgtcattctgcctctgattatcaacctgagggataggcttcacagagagtgtggatacccagcaaacctgagggttcgtgttggtgctgggggtggcattgggtgtccccaagctgcgctggcaactttcaacatgggtgcctctttcattgtcactggaacagtgaaccaagttgccaaacaatctgggacgtgtgacaatgtgaggaaacagcttgcgaaagcaacttactcagatgtttgcatggcaccggcagctgacatgtttgaggaaggtgtgaaacttcaagttttgaagaaaggaacaatgttcccttcaagagccaacaaactctatgagttgttctgcaagtatgattcttttgagtccatgcctccagcagagcttgcgagggttgagaaaagaatcttcagtcgtgcattggaagaggtctgggatgagaccaagaacttctacatcaaccgtctccacaacccagagaagatacagagggctgagagggaccccaaactgaagatgtcactgtgtttcagatggtatctgtccctggcttcaaggtgggccaacactggagcttctgacagagtcatggactaccaagtttggtgtggtcctgccattggttcattcaatgatttcatcaaaggaacttaccttgatccggcagtggcaaatgagtacccgtgtgttgtgcagatcaacaaacagattcttagaggagcgtgcttcttgaggcgtcttgaaatactgagaaatgcaaggctttcagatggtgcagctgcacttgtggcgagcattgatgacacatatgtccctgctgagaagctgtga

SEQ ID NO: 8 - DNA, 4482 bp, Artificial sequence
  Chimeric PUFA OrfC from Schizochytrium sp. ATCC_20888 and Thraustochytrium
  hSzThPUFA OrfC v3 gene
  ref <302>: TITLE: CHIMERIC PUFA POLYKETIDE SYNTHASE SYSTEMS AND USES THEREOF
  ref <310>: PATENT DOCUMENT NUMBER: US 2008-0022422 A1
  ref <311>: PATENT FILING DATE: 2007-05-16
  ref <312>: PUBLICATION DATE: 2008-01-24
atggcgcttcgtgtcaagaccaacaagaagccatgttgggagatgaccaaggaggaactgacctctggcaaaactgaggtgttcaactatgaggaactcctggagtttgcagagggtgacatagctaaggtttttggtccggagtttgctgtcatagacaagtaccccagaagggtgaggctgcctgctcgtgaatacctgcttgtgacaagggtcacactcatggatgccgaggtcaacaactacagagttggtgccagaatggtcactgagtatgatcttccagtgaatggcgaattgtctgagggaggtgattgtccctgggcagttctggttgagagtggacagtgcgatttgatgctgatatcatacatgggaattgatttccagaaccaaggtgacagagtttaccgtctgctcaacaccacgttgacattctatggggttgcccatgagggagagacccttgagtatgacatcagagtgaccggttttgccaaacgtttggatggtggcatctccatgttcttctttgagtatgactgctatgtcaatgggaggcttctcattgagatgagagatggctgtgctggcttcttcacaaatgaggagcttgatgcgggaaagggtgtggtgttcacaagaggggatttggctgccagagctaagattccaaagcaagatgtttctccctatgctgtcgctccctgccttcacaaaacaaaactcaacgaaaaggagatgcagaccttggttgacaaagattgggcttccgtttttggctcaaagaatggcatgccggagatcaactacaaactctgcgcacgtaagatgctcatgattgatagagtcaccagcattgaccataagggaggtgtgtacggtttgggtcagttggttggtgagaaaatcttggagagggaccattggtacttcccatgccattttgttaaggatcaagtcatggctggatctcttgtcagcgacggttgttcacaaatgctcaagatgtacatgatctggctcggtttgcaccttaccaccggaccatttgacttcagacccgtcaacggacacccgaacaaagttaggtgtaggggtcagatatctcctcataagggaaagttggtctacgtcatggagatcaaagagatgggattcgacgaggataacgatccgtacgccattgctgacgtcaacatcattgacgttgatttcgaaaagggtcaagatttcagccttgatagaatcagcgactacggaaagggggatcttaacaaaaagatcgtcgtggacttcaagggcattgctctcaagatgcagaagagatccacgaacaagaacccctccaaagttcagcccgtttttgctaacggtgcagccactgtgggaccggaagcgtccaaggccagctctggtgccagtgctagtgcttctgctgcccctgcgaagcctgctttctcagcagatgttcttgcgccaaagccagttgcacttcctgaacatatcctcaagggtgacgctctcgctccgaaagaaatgtcctggcatcccatgtcaaaacttcctggcaacccgacgccgttcttctcccctagttcttaccctccgagggcaatttgcttcatccctttccctggcaacccacttgacaacaattgcaaagctggagaaatgcctctgaactggtacaacatgtcagagttcatgtgtggaaaagttagcaactgcttgggaccagagttcgcaagatttgataagtcaaatacgagcagaagccctgcttttgatttggctcttgtgactagagttgttgaagtcacaaacatggaacatggcaagttcctgaatgttgattgcaatcccagcaaaggcacaatggtgggggagtttgactgtcctcaagatgcgtggttctttgatggttcttgcaatgatgggcacatgccttattccatcatcatggaaatcggacttcagacatccggtgttctcaccagtgtgttgaaagcaccactgacgatggacaaagatgacattctctttaggaaccttgatgcaagtgctgaaatggtgaggccagatgtggatgtgagggggaaaaccataaggaatgtgaccaagtgcactggatatgcaatgttgggaaagatggggattcacagattcacgtttgagttgtctgttgatggcgtggttttctacaaaggaagcacttcctttggatggttcactccagaggtgtttgctcagcaagctggacttgacaatgggaaaaagacggagccttggtgcaaaactaacaacacgagtgtgagaagagttgaaatcgcatcagccaaaggcaaagaacagctgactgagaaacttccagatgcaactaatgctcaagttctcagaaggtcagaacagtgtgagtatttggattacctcaacattgctcctgattctgggctgcatgggaaaggatatgcgcatggacacaaagatgttaacccacaagactggttcttctcttgtcacttttggtttgatcctgtgatgcctggatctttgggaattgagtcaatgttccagctcattgaggcatttgcggtggaccagaacataccgggagaatacaatgtgagcaatccgacctttgcccatgcccctggaaaaacggcgtggaagtaccgtggtcaattgacaccaaagaaccgtgcgatggactgtgaggtgcacatagtttcaatcacagcctctcctgaaaatggaggctacgttgacatagtggcagatggagcactttgggttgatggtctccgtgtgtatgaagccaaagaactcagagttcgtgttgtcagtgcaaaacctcaagccattccggatgttcaacaacagccacccagcgcaaaagcggaccctgggaaaactggagttgcactcagtccgactcagttgagagatgtcctgcttgaagtggacaatccattgtatcttggtgttgaaaactccaatttggtgcagtttgaatccaaacctgcaacttcttcaaggattgtcagtatcaaaccatgctccataagtgatcttggtgacaagtccttcatggaaacgtacaatgtgtcagcacctctgtacactggagcaatggccaagggaattgcgtctgcggaccttgtcattgctgctgggaagaggaagatattgggttcttttggagcgggtgggcttccaatgcaccatgtgagggcagctttggagaagatacaagcggctctgcctcaaggaccatatgctgtgaacctcattcattcaccttttgacagcaacttggaaaaggggaatgttgatctcttcctcgaaaagggcgttactgtggtggaggcttctgcattcatgaccctcactccccaagttgttcgttaccgtgcagccggactctcaaggaacgctgatgggagtgtcaacatcagaaaccgtatcattggaaaagtgtccagaacagaactcgccgaaatgttcatcagaccggctccggaacacctccttgagaaactcatagcttctggtgagataacacaagaacaagccgaacttgcccgtcgtgttcctgtcgcagacgacatcgctgttgaagctgattctggtggtcacactgacaaccgtcccatccacgtcatcttgcctttgatcatcaaccttaggaacagactgcacagagagtgtggttatcctgcgcaccttagagtcagagttggagctggaggcggtgttggctgcccacaagctgctgcggctgccctcacaatgggagctgccttcatagtgactgggactgtcaatcaagttgctaaacagtccgggacatgtgacaacgtgagaaaacaactcagtcaagccacctacagtgacatttgcatggctccagcagctgatatgtttgaggaaggtgtgaaactccaagttctcaagaagggaacaatgttcccatcaagagctaacaaattgtacgaactcttttgcaagtacgactctttcgattcaatgcctcctgctgaacttgaaaggatcgagaagaggatcttcaagagggcacttcaagaggtctgggaagagaccaaggacttttacatcaatggtttgaagaatccagagaagatacagagagcggaacatgaccccaaactcaagatgtctttgtgtttcagatggtatcttggtcttgcatcacgttgggccaacatgggtgctcctgatcgtgtcatggactatcaagtctggtgtggtccagccattggagccttcaatgacttcatcaaaggaacatatcttgatcctgctgtctctaatgagtacccatgtgttgtccagatcaaccttcagattttgcgtggtgcatgttacctgaggcgtcttaatgctctgagaaatgatccgaggattgatcttgagactgaagatgctgcctttgtctatgagccaacgaatgcgctttga

SEQ ID NO: 9 - DNA, 2343 bp, Schizochytrium sp. ATCC_20888
  hSzThACS-2 v3 gene
  ref <302>: TITLE: POLYUNSATURATED FATTY ACID PRODUCTION IN HETEROLOGOUS ORGANISMS USING PUFA POLYKETIDE SYNTHASE SYSTEMS
  ref <310>: PATENT DOCUMENT NUMBER: US 2007-0245431 A1
  ref <311>: PATENT FILING DATE: 2007-03-15
  ref <312>: PUBLICATION DATE: 2007-10-18
atgcccactccagatgccactgcgcctctcaacaagccgtcagactatgctgtgtaccacgaagaggatggtcctttctggactgctgattcctctggtgtcagcagagtgaacttctctgaaactggtgtgggatctgaaggtgtcattcctgcgctcacactgattgatgtgtttgagcgtgcggtcaaacgtggtggcaataggattgcattcagaacagagaacatgccaaccttgaggcgtggagaagaggctcctgatgctttgccgctcaaagattggaagtcctggtcttggaaacagtacaaagctgatgttcacagaattgcgagggctctgatggatttgggagttgagcagcacgatgcggtctccatctttggcttcaactcaccagaatggttcctcagtgctgtcggtgcagttcatgctggtgccaagatcgctggaatctacccttcagacactcctgctcaagtgcagtacaaagccttccactctgacactgctgttgcagttgtggagaacgaacagtgcttcaagaaattcgcagaggtggttgaggatctcccttacctcaaagccattgtttgttgggattatgaagccacagacatcacaagggaagatggttcagtggttgaagtcctgacctttgctgagttcctgaagagaggtgacactgtggaagcagctgcacttgatgagagaatcagcaagattgagcccaccatgtgtgctgccctgatctacaccagtggcacaactgggagacccaaagctgtcatgatctcccatgacaaccttgtctttgaagcatctgctgtggtcccgaacttgggaggggcatgcacgaccactgctgaggaaaggattctttcctaccttcctttgtctcatgttgctggaatgatggttgacatcattgctccaatcatagcgacagcgttccacaaaggaaggatctgtgtttgttttgccagaccgtatgatttgagaactggaacccttgggcaaagactcaatgcagtggagccaaccatattccttggtgtgccacgtgtgtgggaaaagatccaagagaaattgatggctgttggtgccaaaaccactggtctcaagaagaaactcagcacggcagccaagaaacgtgggcttgaatttcaagaggaacaacagatagggagaagtggtgccaaccctggctttggaccgcttggaatctacaagaaacttttgggcctcatcaaaggaaagttggggctgaccaaatgcaagtttgcctttgctggcgcagctccaatgacccgtgaaacccttcagtactttggagcgctgaacatcaacatcaatgaggtctatggaatgtctgaatgcagtggggctgccacctggtcaactgacaaagctcatgagtggggcactgttggctatgagatgccctcctgtgaagtcagagtgttcaagattgcggaggatggcaccaagacagagtgcccaagagctgctgacatcatgcatgccacagaagaggaacaaggtgaagtttgcttccgtggaaggaacatcatgatgggatacttggccaacccgaaacttggtgatgaccatgttgctgagattgaagagaagaatgcagctgccatagatagcgaagggtggcttcactctggtgacaagggagcaatttccacaaggggaatgctcaagataacgggcagatacaaggagcttatcataggtgctggtggggagaatgtggctcctgttcccattgaagatgccatcaaggcgaggatgccttttgtttcaaatgcaatgatggttggagacaagaggaagttcatggctgtccttctgactttgaaaacggttggagcaactggagagcttcctggcacaaacaagctcatgggagcagctgcggactatggtgagaccattgaggatgcctgtgacaatgaggcgctcattgaagagataacgcagcaactcaaagagataggtgacgatggagatgtcacgccaagcaatgcagcccgtatacaaaagttcacgattttgccactcgacttcagtgtctccacagatgaactgacagcaacgttgaaattgaagagaagtgtggttgcagacaagtatgaggacatcatagaggctttctatgagagcaagtctgtctttgtgccttactcaacagttggagcttatgcaacgggtggaccagttgatgactctgttgtggatggatcattcaaaggtgactttagcatgattggggatgacgatccggatcttcagaatgtggatgtccttgaagcaattgatgaggacaactga

SEQ ID NO: 10 - DNA, 714 bp, Nostoc sp. PCC 7120
  NoHetI v3 gene
  ref <308>: DATABASE ACCESSION NUMBER: GenBank: P37695
  ref <309>: DATABASE ENTRY DATE: 1994-10-01
atgcttcagcacacttggcttccgaagcctcccaatctgaccctcttgtcagatgaggttcatctctggaggattcctcttgaccagcctgagtcacaacttcaagaccttgctgccaccctgagcagtgatgaattggcgagggcaaacagattctactttccagaacacagaaggcgtttcactgctgggagaggcatcctcagatccatcttgggtggatacttgggagtggaaccgggtcaagtcaagtttgattatgagtcccgtgggaaaccgatccttggtgacagatttgctgagagtggactcctgttcaacttgtctcacagccagaaccttgccttgtgtgctgtcaactacacgcgtcaaataggcattgatcttgaatatctgcgtccaacatctgacttggagtctcttgcaaagaggttctttctcccaagagaatatgaactcttgaggtcactccctgatgagcagaaacagaagattttctttcgttactggacttgcaaagaggcttatctcaaagcaacgggagatggaatagccaaacttgaagagatcgagatagcactcaccccaacagaacctgccaagctccaaacagctcctgcgtggtctctgttggagcttgtgccagatgacaattgtgttgcagctgtggctgttgcgggttttggttggcagcccaagttctggcattactga

SEQ ID NO: 11 - DNA, 240 bp, Arabidopsis thaliana
  Chloroplast targeting sequence from ribulose bisphosphate carboxylase small chain 1A
atggcttcctctatgctctcttccgctactatggttgcctctccggctcaggccactatggtcgctcctttcaacggacttaagtcctccgctgccttcccagccacccgcaaggctaacaacgacattacttccatcacaagcaacggcggaagagttaactgcatgcaggtgtggcctccgattggaaagaagaagtttgagactctctcttaccttcctgaccttaccgattccgaa

SEQ ID NO: 12 - DNA, 29 bp, Artificial sequence
  TQPATS primer
acaagagtggattgatgatctagagaggt

SEQ ID NO: 13 - DNA, 29 bp, Artificial sequence
  TQPATA primer
ctttgatgcctatgtgacacgtaaacagt

SEQ ID NO: 14 - DNA, 29 bp, Artificial sequence
  TQPATFQ primer
ggtgttgtggctggtattgcttacgctgg

SEQ ID NO: 15 - DNA, 23 bp, Artificial sequence
  HMGF primer
cctctctaccaccgtctcacatg

SEQ ID NO: 16 - DNA, 20 bp, Artificial sequence
  HMGR primer
gatctggccggactgtttca

SEQ ID NO: 17 - DNA, 25 bp, Artificial sequence
  HMG-HEX primer
cgctcctcagctaccacctcaacca

SEQ ID NO: 18 - DNA, 24 bp, Artificial sequence
  MAS480 primer
cgagttcggactcaacatgttcca

SEQ ID NO: 19 - DNA, 24 bp, Artificial sequence
  MAS554 primer
aaggttgacgccagcgacaacgag

SEQ ID NO: 20 - DNA, 24 bp, Artificial sequence
  MAS547 primer
aagtttggagttggcttctgcagc

SEQ ID NO: 21 - DNA, 24 bp, Artificial sequence
  MAS581 primer
tgagtttggtctcaacatgttcca

SEQ ID NO: 22 - DNA, 24 bp, Artificial sequence
  MAS556 primer
gatgcacgccaaggtggttgacat

SEQ ID NO: 23 - DNA, 24 bp, Artificial sequence
  MAS481 primer
taatgtagaagggcttgtcctgcg

SEQ ID NO: 24 - DNA, 24 bp, Artificial sequence
  MAS550 primer
gatgcacgcaaaggtggttgacat

SEQ ID NO: 25 - DNA, 24 bp, Artificial sequence
  MAS572 primer
tgatgtagaagggtttgtcttgtg

SEQ ID NO: 26 - DNA, 24 bp, Artificial sequence
  MAS482 primer
catgagatgcatgacgagaagagg

SEQ ID NO: 27 - DNA, 24 bp, Artificial sequence
  MAS483
tggcaacttggttcactgttccag

SEQ ID NO: 28 - DNA, 24 bp, Artificial sequence
  MAS488 primer
cgcttcgtgtcaagaccaacaaga

SEQ ID NO: 29 - DNA, 24 bp, Artificial sequence
  MAS489 primer
gcaccacgcaaaatctgaaggttg

SEQ ID NO: 30 - DNA, 24 bp, Artificial sequence
  MAS496 primer
gaacttctctgaaactggtgtggg

SEQ ID NO: 31 - DNA, 24 bp, Artificial sequence
  MAS497
tcacaggcatcctcaatggtctca

SEQ ID NO: 32 - DNA, 24 bp, Artificial sequence
  MAS500 primer
tcagatgaggttcatctctggagg

SEQ ID NO: 33 - DNA, 24 bp, Artificial sequence
  MAS501 primer
atctggcacaagctccaacagaga

SEQ ID NO: 34 - DNA, 2346 bp, Artificial sequence
  SzACS-2 v4
atggctcccactcccgacgccaccgcgcctctgaacaagccgagcgactatgccgtctaccacgaggaagacggccccttctggaccgccgattccagcggcgtctcgcgcgtgaactttagcgagaccggcgtgggatccgagggcgtcatccctgcgctcacgctcatcgacgtcttcgagagggccgtcaagcgcggcggaaacaggatcgccttccgcacggaaaacatgcccacgctccgccgcggcgaagaggccccggacgcgctgccgctcaaggactggaagtcctggtcctggaaacagtacaaggccgacgtccaccgcatcgccagggctctcatggacctcggcgttgagcagcacgacgccgtctcgatttttggctttaactcgcccgaatggtttctcagtgccgtcggcgccgtgcacgcaggtgccaagattgccggtatttacccctcagacacgcccgcccaggtccagtacaaggccttccacagtgacaccgctgttgccgttgtcgaaaacgagcagtgcttcaagaagttcgccgaggtcgtcgaggaccttccttacctcaaggccattgtttgctgggactatgaagccacagacatcacgcgcgaggacggctccgtcgtcgaggtcctcacctttgccgagttcctcaagcgcggcgacaccgtcgaggcggccgcccttgacgagcgcatctccaagatcgagcccaccatgtgcgctgcccttatttacaccagcggtactaccggccgccccaaggccgttatgatttcgcacgacaaccttgttttcgaggccagcgccgtcgtccccaacctcggaggagcctgtacgaccactgctgaggagcgcattctctcgtacctgcctctctcgcacgtcgctggtatgatggttgatattattgcccccatcattgccaccgccttccacaagggccgcatctgcgtctgctttgctcgcccgtacgatttgcgcaccggcacgctgggccagcgcctcaacgccgtggagcccaccatcttccttggcgtgccccgtgtgtgggaaaagattcaggaaaagctcatggccgtcggtgccaaaaccaccggcctcaagaagaagctctctacggccgccaagaagcgtggtcttgaattccaggaggagcagcaaatcggccgctccggtgccaaccctggctttggcccccttggcatctacaagaagctcctcggcctcatcaagggcaagctgggcctcaccaagtgcaagtttgcctttgctggtgccgcgcccatgacccgtgagacccttcagtactttggcgcgctgaacatcaacattaacgaggtctacggcatgtcagagtgctccggtgccgccacctggtccacggacaaggcccacgagtggggcactgttggctacgagatgcccagttgcgaggtccgcgtcttcaagattgccgaggacggtaccaagaccgagtgcccgcgcgccgccgacattatgcatgctaccgaggaggagcagggcgaagtttgcttccgcggccgtaacatcatgatgggctaccttgccaaccccaagcttggcgacgaccacgttgccgagatcgaggagaagaacgctgccgctatcgactccgagggctggctccacagtggtgataagggcgccatttctacccgcggcatgctcaagatcacgggccgctacaaggagctcatcatcggcgccggtggcgagaacgtggcgcccgtccctattgaggacgccatcaaggcgcgcatgccttttgtttccaacgccatgatggtcggagataagcgcaagttcatggctgtcctccttaccctcaagacggttggcgccacgggcgagcttcccggtacgaacaagctcatgggcgctgccgccgactacggtgagaccatcgaggacgcctgcgacaacgaggcgctcattgaggagatcacgcagcagctcaaggagatcggtgatgatggcgatgtcacgccctcgaacgcggctcgcatccaaaagttcaccattctcccgctcgacttttccgtctccacggacgagctcacggccacgctcaagctcaagcgctccgtggtcgcagacaagtacgaagacatcatcgaggccttttacgagtccaagagcgtttttgtgccgtactcgaccgttggcgcctacgccacgggcggcccggtcgacgactccgttgtcgatggctcattcaagggcgactttagcatgattggcgacgatgatccggatcttcaaaacgtcgatgtcctcgaggcgattgacgaggacaattaa

SEQ ID NO: 35 - DNA, 33034 bp, Artificial sequence
  Plasmid pDAB7361 T-strand
cagtcagcatcatcacaccaaaagttaggcccgaatagtttgaaattagaaagctcgcaattgaggtctacaggccaaattcgctcttagccgtacaatattactcaccggatcctaaccggtttaattaaggcgcgccatgcccgggcaagcggccgcacaagtttgtacaaaaaagcaggcttctagacctagctaggtggagtcatcacgcagactatctcagcatgtgcgtagcacgcggccgcagcttatagtaaagatttttttgttaataaaatgaaagttaatatttatggatttatttgaacatatttacaagtttttgttaataaatttatttacagaagtgttaaatttgaaaatgtgttaaatgagagttaatatttatggatataatattactttatttaaaaataaaatgaatttatattaaaatatgatttggtaaaagatattataaagaggaacttggatgagaaagacgacgatgggcaaaagttgcatggcacaccgcttttgttcagtaacatctgcactgtggcgcctttttcacactcaccatgcatgctgccacgtcagctttcacactatgacaccactggccatacacgttgccacctcagctttctcctcttctcactatgacacgactggccatgcatgcatgcatgctgccacctcagctcccgcctcttcacccgtgtctttctctcatgtcgcagtgctgcgtgccaacctcttctctctataaatagagagaagagaatgatggttaaactcaaaccaaaacaagaaaacatacacaaatagcaaaacggatccacaaccaaaaatggcggcccgtctgcaggagcaaaagggaggcgagatggatacccgcattgccatcatcggcatgtcggccatcctcccctgcggcacgaccgtgcgcgagtcgtgggagaccatccgcgccggcatcgactgcctgtcggatctccccgaggaccgcgtcgacgtgacggcgtactttgaccccgtcaagaccaccaaggacaagatctactgcaagcgcggtggcttcattcccgagtacgactttgacgcccgcgagttcggactcaacatgttccagatggaggactcggacgcaaaccagaccatctcgcttctcaaggtcaaggaggccctccaggacgccggcatcgacgccctcggcaaggaaaagaagaacatcggctgcgtgctcggcattggcggcggccaaaagtccagccacgagttctactcgcgccttaattatgttgtcgtggagaaggtcctccgcaagatgggcatgcccgaggaggacgtcaaggtcgccgtcgaaaagtacaaggccaacttccccgagtggcgcctcgactccttccctggcttcctcggcaacgtcaccgccggtcgctgcaccaacaccttcaacctcgacggcatgaactgcgttgtcgacgccgcatgcgcctcgtccctcatcgccgtcaaggtcgccatcgacgagctgctctacggtgactgcgacatgatggtcaccggtgccacctgcacggataactccatcggcatgtacatggccttctccaagacccccgtgttctccacggaccccagcgtgcgcgcctacgacgaaaagacaaagggcatgctcatcggcgagggctccgccatgctcgtcctcaagcgctacgccgacgccgtccgcgacggcgatgagatccacgctgttattcgcggctgcgcctcctccagtgatggcaaggccgccggcatctacacgcccaccatttcgggccaggaggaggccctccgccgcgcctacaaccgcgcctgtgtcgacccggccaccgtcactctcgtcgagggtcacggcaccggtactcccgttggcgaccgcatcgagctcaccgccttgcgcaacctctttgacaaggcctacggcgagggcaacaccgaaaaggtcgctgtgggcagcatcaagtccagcatcggccatctcaaggccgtcgccggtctcgccggtatgatcaaggtcatcatggcgctcaagcacaagactctcccgggcaccatcaacgtcgacaacccacccaacctctacgacaacacgcccatcaacgagtcctcgctctacattaacaccatgaaccgcccctggttcccgccccctggtgtgccccgccgcgccggcatttcgagctttggctttggtggcgccaactaccacgccgtcctcgaggaggccgagcccgagcacacgaccgcgtaccgcctcaacaagcgcccgcagcccgtgctcatgatggccgccacgcccgcggccctccagtcgctctgcgaggcccagctcaaggagttcgaggccgccatcaaggagaacgagaccgtcaagaacaccgcctacatcaagtgcgtcaagttcggcgagcagttcaaattccctggctccatcccggccacaaacgcgcgcctcggcttcctcgtcaaggatgctgaggatgcctgctccaccctccgtgccatctgcgcccaattcgccaaggatgtcaccaaggaggcctggcgcctcccccgcgagggcgtcagcttccgcgccaagggcatcgccaccaacggcgctgtcgccgcgctcttctccggccagggcgcgcagtacacgcacatgtttagcgaggtggccatgaactggccccagttccgccagagcattgccgccatggacgccgcccagtccaaggtcgctggaagcgacaaggactttgagcgcgtctcccaggtcctctacccgcgcaagccgtacgagcgtgagcccgagcaggaccacaagaagatctccctcaccgcctactcgcagccctcgaccctggcctgcgctctcggtgcctttgagatcttcaaggaggccggcttcaccccggactttgccgccggccattcgctcggtgagttcgccgccctctacgccgcgggctgcgtcgaccgcgacgagctctttgagcttgtctgccgccgcgcccgcatcatgggcggcaaggacgcaccggccacccccaagggctgcatggccgccgtcattggccccaacgccgagaacatcaaggtccaggccgccaacgtctggctcggcaactccaactcgccttcgcagaccgtcatcaccggctccgtcgaaggtatccaggccgagagcgcccgcctccagaaggagggcttccgcgtcgtgcctcttgcctgcgagagcgccttccactcgccccagatggagaacgcctcgtcggccttcaaggacgtcatctccaaggtctccttccgcacccccaaggccgagaccaagctcttcagcaacgtctctggcgagacctaccccacggacgcccgcgagatgcttacgcagcacatgaccagcagcgtcaagttcctcacccaggtccgcaacatgcaccaggccggtgcgcgcatctttgtcgagttcggacccaagcaggtgctctccaagcttgtctccgagaccctcaaggatgacccctcggttgtcaccgtctctgtcaacccggcctcgggcacggattcggacatccagctccgcgacgcggccgtccagctcgttgtcgctggcgtcaaccttcagggctttgacaagtgggacgcccccgatgccacccgcatgcaggccatcaagaagaagcgcactaccctccgcctttcggccgccacctacgtctcggacaagaccaagaaggtccgcgacgccgccatgaacgatggccgctgcgtcacctacctcaagggcgccgcaccgctcatcaaggccccggagcccgttgtcgacgaggccgccaagcgcgaggccgagcgtctccagaaggagcttcaggatgcccagcgccagctcgacgacgccaagcgcgccgccgccgaggccaactccaagctcgccgctgccaaggaggaggccaagaccgccgctgcttcggccaagcccgcagttgacactgctgttgtcgaaaagcatcgtgccatcctcaagtccatgctcgcggagctcgatggctacggatcggtcgacgcttcttccctccagcagcagcagcagcagcagacggcccccgccccggtcaaggctgctgcgcctgccgcccccgttgcctcggcccctgccccggctgtctcgaacgagcttcttgagaaggccgagactgtcgtcatggaggtcctcgccgccaagaccggctacgagaccgacatgatcgaggctgacatggagctcgagaccgagctcggcattgactccatcaagcgtgtcgagatcctctccgaggtccaggccatgctcaatgtcgaggccaaggatgtcgatgccctcagccgcactcgcactgttggtgaggttgtcaacgccatgaaggccgagatcgctggcagctctgccccggcgcctgctgccgctgctccggctccggccaaggctgcccctgccgccgctgcgcctgctgtctcgaacgagcttctcgagaaggccgagaccgtcgtcatggaggtcctcgccgccaagactggctacgagactgacatgatcgagtccgacatggagctcgagactgagctcggcattgactccatcaagcgtgtcgagatcctctccgaggttcaggccatgctcaacgtcgaggccaaggacgtcgacgctctcagccgcactcgcactgtgggtgaggtcgtcaacgccatgaaggctgagatcgctggtggctctgccccggcgcctgccgccgctgccccaggtccggctgctgccgcccctgcgcctgccgccgccgcccctgctgtctcgaacgagcttcttgagaaggccgagaccgtcgtcatggaggtcctcgccgccaagactggctacgagactgacatgatcgagtccgacatggagctcgagaccgagctcggcattgactccatcaagcgtgtcgagattctctccgaggtccaggccatgctcaacgtcgaggccaaggacgtcgacgctctcagccgcacccgcactgttggcgaggtcgtcgatgccatgaaggccgagatcgctggtggctctgccccggcgcctgccgccgctgctcctgctccggctgctgccgcccctgcgcctgccgcccctgcgcctgctgtctcgagcgagcttctcgagaaggccgagactgtcgtcatggaggtcctcgccgccaagactggctacgagactgacatgatcgagtccgacatggagctcgagaccgagctcggcattgactccatcaagcgtgtcgagattctctccgaggtccaggccatgctcaacgtcgaggccaaggacgtcgacgctctcagccgcacccgcactgttggcgaggtcgtcgatgccatgaaggccgagatcgctggtggctctgccccggcgcctgccgccgctgctcctgctccggctgctgccgcccctgcgcctgccgcccctgcgcctgccgcccctgcgcctgctgtctcgagcgagcttctcgagaaggccgagactgtcgtcatggaggtcctcgccgccaagactggctacgagactgacatgattgagtccgacatggagctcgagaccgagctcggcattgactccatcaagcgtgtcgagattctctccgaggttcaggccatgctcaacgtcgaggccaaggacgtcgacgctctcagccgcactcgcactgttggtgaggtcgtcgatgccatgaaggctgagatcgctggcagctccgcctcggcgcctgccgccgctgctcctgctccggctgctgccgctcctgcgcccgctgccgccgcccctgctgtctcgaacgagcttctcgagaaagccgagactgtcgtcatggaggtcctcgccgccaagactggctacgagactgacatgatcgagtccgacatggagctcgagactgagctcggcattgactccatcaagcgtgtcgagatcctctccgaggttcaggccatgctcaacgtcgaggccaaggacgtcgatgccctcagccgcacccgcactgttggcgaggttgtcgatgccatgaaggccgagatcgctggtggctctgccccggcgcctgccgccgctgcccctgctccggctgccgccgcccctgctgtctcgaacgagcttctcgagaaggccgagactgtcgtcatggaggtcctcgccgccaagactggctacgagaccgacatgatcgagtccgacatggagctcgagaccgagctcggcattgactccatcaagcgtgtcgagattctctccgaggttcaggccatgctcaacgtcgaggccaaggacgtcgatgctctcagccgcactcgcactgttggcgaggtcgtcgatgccatgaaggctgagatcgccggcagctccgccccggcgcctgccgccgctgctcctgctccggctgctgccgctcctgcgcccgctgccgctgcccctgctgtctcgagcgagcttctcgagaaggccgagaccgtcgtcatggaggtcctcgccgccaagactggctacgagactgacatgattgagtccgacatggagctcgagactgagctcggcattgactccatcaagcgtgtcgagatcctctccgaggttcaggccatgctcaacgtcgaggccaaggacgtcgatgccctcagccgcacccgcactgttggcgaggttgtcgatgccatgaaggccgagatcgctggtggctctgccccggcgcctgccgccgctgcccctgctccggctgccgccgcccctgctgtctcgaacgagcttcttgagaaggccgagaccgtcgtcatggaggtcctcgccgccaagactggctacgagaccgacatgatcgagtccgacatggagctcgagaccgagctcggcattgactccatcaagcgtgtcgagattctctccgaggttcaggccatgctcaacgtcgaggccaaggacgtcgacgctctcagccgcactcgcactgttggcgaggtcgtcgatgccatgaaggctgagatcgctggtggctctgccccggcgcctgccgccgctgctcctgcctcggctggcgccgcgcctgcggtcaagattgactcggtccacggcgctgactgtgatgatctttccctgatgcacgccaaggtggttgacatccgccgcccggacgagctcatcctggagcgccccgagaaccgccccgttctcgttgtcgatgacggcagcgagctcaccctcgccctggtccgcgtcctcggcgcctgcgccgttgtcctgacctttgagggtctccagctcgctcagcgcgctggtgccgctgccatccgccacgtgctcgccaaggatctttccgcggagagcgccgagaaggccatcaaggaggccgagcagcgctttggcgctctcggcggcttcatctcgcagcaggcggagcgcttcgagcccgccgaaatcctcggcttcacgctcatgtgcgccaagttcgccaaggcttccctctgcacggctgtggctggcggccgcccggcctttatcggtgtggcgcgccttgacggccgcctcggattcacttcgcagggcacttctgacgcgctcaagcgtgcccagcgtggtgccatctttggcctctgcaagaccatcggcctcgagtggtccgagtctgacgtcttttcccgcggcgtggacattgctcagggcatgcaccccgaggatgccgccgtggcgattgtgcgcgagatggcgtgcgctgacattcgcattcgcgaggtcggcattggcgcaaaccagcagcgctgcacgatccgtgccgccaagctcgagaccggcaacccgcagcgccagatcgccaaggacgacgtgctgctcgtttctggcggcgctcgcggcatcacgcctctttgcatccgggagatcacgcgccagatcgcgggcggcaagtacattctgcttggccgcagcaaggtctctgcgagcgaaccggcatggtgcgctggcatcactgacgagaaggctgtgcaaaaggctgctacccaggagctcaagcgcgcctttagcgctggcgagggccccaagcccacgccccgcgctgtcactaagcttgtgggctctgttcttggcgctcgcgaggtgcgcagctctattgctgcgattgaagcgctcggcggcaaggccatctactcgtcgtgcgacgtgaactctgccgccgacgtggccaaggccgtgcgcgatgccgagtcccagctcggtgcccgcgtctcgggcatcgttcatgcctcgggcgtgctccgcgaccgtctcatcgagaagaagctccccgacgagttcgacgccgtctttggcaccaaggtcaccggtctcgagaacctcctcgccgccgtcgaccgcgccaacctcaagcacatggtcctcttcagctcgctcgccggcttccacggcaacgtcggccagtctgactacgccatggccaacgaggcccttaacaagatgggcctcgagctcgccaaggacgtctcggtcaagtcgatctgcttcggtccctgggacggtggcatggtgacgccgcagctcaagaagcagttccaggagatgggcgtgcagatcatcccccgcgagggcggcgctgataccgtggcgcgcatcgtgctcggctcctcgccggctgagatccttgtcggcaactggcgcaccccgtccaagaaggtcggctcggacaccatcaccctgcaccgcaagatttccgccaagtccaaccccttcctcgaggaccacgtcatccagggccgccgcgtgctgcccatgacgctggccattggctcgctcgcggagacctgcctcggcctcttccccggctactcgctctgggccattgacgacgcccagctcttcaagggtgtcactgtcgacggcgacgtcaactgcgaggtgaccctcaccccgtcgacggcgccctcgggccgcgtcaacgtccaggccacgctcaagaccttttccagcggcaagctggtcccggcctaccgcgccgtcatcgtgctctccaaccagggcgcgcccccggccaacgccaccatgcagccgccctcgctcgatgccgatccggcgctccagggctccgtctacgacggcaagaccctcttccacggcccggccttccgcggcatcgatgacgtgctctcgtgcaccaagagccagcttgtggccaagtgcagcgctgtccccggctccgacgccgctcgcggcgagtttgccacggacactgacgcccatgaccccttcgtgaacgacctggcctttcaggccatgctcgtctgggtgcgccgcacgctcggccaggctgcgctccccaactcgatccagcgcatcgtccagcaccgcccggtcccgcaggacaagcccttctacattaccctccgctccaaccagtcgggcggtcactcccagcacaagcacgcccttcagttccacaacgagcagggcgatctcttcattgatgtccaggcttcggtcatcgccacggacagccttgccttctaaatctaaactaggccatggtgacttaaggtagttagcttaatcacttaggtcacccagtccaagcccggcctagcacgatgatcatgagtgttgctattgatgtatgttaatactatacacagtcatcgtgtgtgttttataaaactgtaagcttaggatgtttgaggctaatgtaattagcactacaccgtaataaatgagaggtttactttatgttttaataatgttcttacccttgctgctctctaaactgtaatggcgtacggttagctaaactaaagtaaaaatcgattcgcttgagtaaaattagtgaccgggaaagatcatcgactactactgctcagagatgtaatcggtaattaagacttcaagctcaataattaattaggagtaaatctggcttcgaatttttaaattgtcaacttccaaagaaggattggcaagactcaatctcaattgcccaacaaacatatggctctttacaaatttggaatctctttttgatggcaagaacgtcgtaattcctctgtcgatctcatgtaattaccaaactcatctacttattactttctttatatgcacttactgatgcggccgcttaattaagatgagtgatactcaggactcaggactcactctgctgatcactagtgctagcctcgaggtcgacacaactttgtatacaaaagttgtctagacctaggctcagcaactcatccagtcaagttcgagtcagtgagttgggcggccgcagcttatagtaaagatttttttgttaataaaatgaaagttaatatttatggatttatttgaacatatttacaagtttttgttaataaatttatttacagaagtgttaaatttgaaaatgtgttaaatgagagttaatatttatggatataatattactttatttaaaaataaaatgaatttatattaaaatatgatttggtaaaagatattataaagaggaacttggatgagaaagacgacgatgggcaaaagttgcatggcacaccgcttttgttcagtaacatctgcactgtggcgcctttttcacactcaccatgcatgctgccacgtcagctttcacactatgacaccactggccatacacgttgccacctcagctttctcctcttctcactatgacacgactggccatgcatgcatgcatgctgccacctcagctcccgcctcttcacccgtgtctttctctcatgtcgcagtgctgcgtgccaacctcttctctctataaatagagagaagagaatgatggttaaactcaaaccaaaacaagaaaacatacacaaatagcaaaacggatccacaaccaaaaatggctgcaaggaacgtgagtgcggctcatgagatgcatgacgagaagaggatagctgttgtgggcatggctgttcagtatgctggatgcaaaacgaaagacgagttctgggaagttctcatgaatggaaaagttgagagcaaagtgatcagcgacaaacgtcttggttcaaattaccgtgctgaacactacaaagctgaaaggagcaagtatgctgacaccttctgcaatgagacatatggaactcttgatgagaacgaaatagacaatgagcatgaactccttttgaaccttgccaaacaagccttggctgaaacatctgtcaaagattcaacaagatgtggcatagtttctggatgcctcagcttcccgatggacaacctccaaggtgaactcttgaatgtgtaccagaaccatgttgagaagaaacttggtgccagagttttcaaagatgcctctcactggtcagaaagagaacagtccaacaaaccagaggctggtgacagaagaatcttcatggaccctgcttcctttgttgctgaggaactcaatcttggcgctctccactactctgttgatgctgcctgtgccactgcgctctatgtgctcagactggcgcaagatcacttggtctctggtgcagctgatgtgatgctttgtggtgcaacatgcctgccggagccgtttttcatactctctgggttctcaaccttccaagccatgcctgttggaacgggtcagaatgtgtccatgccgctgcacaaagattctcaaggattgacccctggtgaaggaggttccatcatggtcctcaaacgtttggatgacgcaatcagagatggagatcacatctatggaacacttttgggagccaatgtcagcaacagtggcactggtctgccacttaaaccccttttgccgtcagagaaaaagtgcctcatggacacctacacacgtatcaatgtgcatccccacaagattcagtatgttgaatgccatgcaactgggactccacaaggtgatcgtgtggaaattgatgctgtgaaggcttgctttgaaggcaaagtcccacgttttggaaccacaaaagggaactttggacacacattggtggcagctgggtttgctggcatgtgcaaagtgcttctctccatgaagcacgggatcattccacccactccgggaatagatgacgaaacgaagatggaccctctggttgtctctggtgaggccattccctggccagaaacgaatggagaaccgaagcgtgctggtctctcagcgtttggatttggtgggaccaatgctcatgctgtctttgaggaacatgacccaagcaatgctgcatgcactggccatgactccatttctgctctctctgcacgttgtggtggtgagtcaaacatgagaatagcaatcactgggatggatgccacttttggtgctttgaaaggattggatgcttttgaaagggccatctacactggtgctcatggtgctataccactcccagaaaagagatggagattcctggggaaagacaaggacttccttgatctttgtggagtcaaagcaacaccgcatggctgttacattgaagatgttgaagttgatttccagaggctgaggactccaatgactcctgaagatatgctcttgcctcaacagcttctggctgtcaccacaattgatagggccatattggactctggcatgaagaaaggtggaaatgtggctgtctttgtggggttggggaccgatcttgaactctaccgtcaccgtgcaagggttgctctcaaggagagagtgaggcctgaagccagcaagaaactcaatgacatgatgcagtacatcaatgattgtgggacaagcacttcttacaccagctacataggcaacttggttgcaacaagggtcagttcacaatggggcttcacgggaccttccttcacaatcacagaaggcaacaattctgtgtacagatgtgctgaacttggcaaatacctcttggaaacgggagaggttgatggggttgtggttgcgggtgttgatctctgtgggagtgctgagaacctttacgtcaagtcaaggcgtttcaaggtgtctacatctgacaccccgagagccagctttgatgcagctgctgatggttactttgttggagagggctgtggtgcatttgtgctcaagcgtgagacaagctgcaccaaggatgacagaatctatgcttgcatggatgccatagttcctggaaatgttccatctgcatgtttgagagaggcattggatcaagccagagtcaagcctggagacatcgagatgttggagctttctgctgattcagcgaggcatttgaaggacccgtctgttctcccaaaggaactcactgctgaggaagagattggcggacttcagacgattcttcgtgacgatgacaagctcccaaggaatgttgcaactggaagtgtcaaggccactgttggtgacactggttatgcttctggtgctgccagtttgattaaggctgcgctttgcatctacaaccgttacctgcccagcaatggagatgactgggatgaacctgcacctgaagcaccctgggacagcacactctttgcgtgccagacctcaagagcttggttgaagaaccctggtgagagacgttatgcggctgtttccggagtcagtgaaaccagaagttgctacagtgtgctgctttctgaagcagagggacactacgagagagagaacagaatcagtttggatgaggaagcacccaagctcattgtgttgagagcagactcccatgaagagattcttggaagattggacaagataagggaaaggttcttgcagcccacgggtgctgcacccagagagtctgaattgaaggcgcaagcccgtaggatctttcttgaactccttggtgagacccttgcccaagatgcagcttcatctggaagtcagaagccccttgctctcagcttggtctccactccatccaagctccagagagaggtggaacttgcggcaaaaggcattccgagatgtctcaagatgagacgtgattggagttcccctgctggaagcagatatgcgcctgagcctttggccagtgacagagttgccttcatgtatggagaaggaaggagcccttactatggcatcacacaagacattcataggatttggcctgaacttcatgaggtcatcaatgagaaaacaaaccgtctctgggctgaaggtgacagatgggtcatgccaagggccagcttcaagagtgagcttgagtcacaacagcaagagtttgacagaaacatgattgaaatgttccgtcttggaatcctcacctcaattgccttcacaaacctggcgagagatgttctcaacatcacgcccaaagcagcctttggactcagtttgggagagatttccatgatctttgctttctccaagaaaaacggtttgataagcgatcagttgacaaaggatttgagagagtcagatgtctggaacaaagctctggctgttgagttcaatgcgctcagagaagcctggggcattccacagtctgtcccaaaagatgagttctggcaaggttacatagtgaggggaacgaaacaagacatagaagcagccatagcaccagactcaaagtatgtgaggttgaccatcatcaatgatgccaacactgctctcatcagtggaaagcctgatgcatgcaaagctgcgattgctcgtcttggtggcaacatccctgcgcttccagtcactcaaggcatgtgtgggcattgcccagaggtgggaccttacaccaaggacatcgcaaagatccacgccaaccttgagttccctgtggttgatggtcttgatctctggactaccataaaccagaagaggcttgtgccaagagccacgggtgccaaagatgaatgggctccttcatcctttggggagtatgctggacagctctatgagaaacaagccaacttccctcagatagttgaaaccatctacaagcagaactatgatgtgtttgttgaagttgggccaaacaatcacagaagcacagcagtgagaaccacgcttggaccacagagaaaccaccttgctggtgccatagacaagcagaacgaggatgcttggacgacaatagtcaagctcgtggcttcattgaaggctcaccttgttcctggagtgaccatcagtccgctctaccactccaagctcgttgcagaggctgaggcttgttatgctgcgctctgtaaaggtgagaaacccaagaaaaacaagtttgtgagaaagattcagttgaatggcagattcaacagcaaggcagaccccatctcctcagcagaccttgcatccttcccacctgcggaccctgcgattgaagctgccatctcttcaaggatcatgaagcctgtggctccgaaattctatgcgcgtctcaacattgatgagcaagatgagaccagagatccgatcttgaacaaggacaatgcgccttccagctccagctcttccagcagttcctcttccagcagttcatctccgtctcctgctccttcagctccagttcagaagaaagctgccccagctgcggagacaaaagctgttgccagtgctgatgcacttcgtagtgccctgcttgatcttgactccatgcttgcgctcagctctgcaagtgcttctggcaaccttgttgagactgcgccatctgatgccagtgtcattgtccctccgtgcaacattgctgatcttggcagcagagctttcatgaaaacttatggtgtttctgcgcctctgtacaccggtgcaatggccaagggaattgcctctgcggacttggtgatcgcagctggaaggcaaggaatccttgcgtcatttggtgctggaggccttccaatgcaagttgtgcgtgagtccattgaaaagattcaagctgccctgcccaatggaccatatgctgtcaacctcatccattctccttttgacagcaaccttgagaagggaaatgttgatctcttcttggaaaagggtgtcacttttgttgaggcttcagccttcatgacgttgacaccgcaagttgtcagatacagagcggctgggttgacgaggaatgcagatgggtcagtcaacataaggaacagaatcattgggaaagtctccagaactgagctggctgaaatgttcatgcgtcctgcacctgagcatcttttgcagaagctcattgcttctggggagatcaatcaagaacaagctgagttggccagacgtgttcctgtggctgatgacattgcggttgaagctgattctggtggacacactgacaaccgtccaatccatgtcattctgcctctgattatcaacctgagggataggcttcacagagagtgtggatacccagcaaacctgagggttcgtgttggtgctgggggtggcattgggtgtccccaagctgcgctggcaactttcaacatgggtgcctctttcattgtcactggaacagtgaaccaagttgccaaacaatctgggacgtgtgacaatgtgaggaaacagcttgcgaaagcaacttactcagatgtttgcatggcaccggcagctgacatgtttgaggaaggtgtgaaacttcaagttttgaagaaaggaacaatgttcccttcaagagccaacaaactctatgagttgttctgcaagtatgattcttttgagtccatgcctccagcagagcttgcgagggttgagaaaagaatcttcagtcgtgcattggaagaggtctgggatgagaccaagaacttctacatcaaccgtctccacaacccagagaagatacagagggctgagagggaccccaaactgaagatgtcactgtgtttcagatggtatctgtccctggcttcaaggtgggccaacactggagcttctgacagagtcatggactaccaagtttggtgtggtcctgccattggttcattcaatgatttcatcaaaggaacttaccttgatccggcagtggcaaatgagtacccgtgtgttgtgcagatcaacaaacagattcttagaggagcgtgcttcttgaggcgtcttgaaatactgagaaatgcaaggctttcagatggtgcagctgcacttgtggcgagcattgatgacacatatgtccctgctgagaagctgtgagtagttagcttaatcacttaggtcacccagtccaagcccggcctagcacgatgatcatgagtgttgctattgatgtatgttaatactatacacagtcatcgtgtgtgttttataaaactgtaagcttaggatgtttgaggctaatgtaattagcactacaccgtaataaatgagaggtttactttatgttttaataatgttcttacccttgctgctctctaaactgtaatggcgtacggttagctaaactaaagtaaaaatcgattcgcttgagtaaaattagtgaccgggaaagatcatcgactactactgctcagagatgtaatcggtaattaagacttcaagctcaataattaattaggagtaaatctggcttcgaatttttaaattgtcaacttccaaagaaggattggcaagactcaatctcaattgcccaacaaacatatggctctttacaaatttggaatctctttttgatggcaagaacgtcgtaattcctctgtcgatctcatgtaattaccaaactcatctacttattactttctttatatgcacttactgatgcggccgcttaattaatctgacctgaccactagacctgagtgagtacagatgtgctactagtgctagcctcgaggtcgaccaacttttctatacaaagttgtctagacctaggactaggcactgagtgactcactgacctgactgagtgactggcggccgcagcttatagtaaagatttttttgttaataaaatgaaagttaatatttatggatttatttgaacatatttacaagtttttgttaataaatttatttacagaagtgttaaatttgaaaatgtgttaaatgagagttaatatttatggatataatattactttatttaaaaataaaatgaatttatattaaaatatgatttggtaaaagatattataaagaggaacttggatgagaaagacgacgatgggcaaaagttgcatggcacaccgcttttgttcagtaacatctgcactgtggcgcctttttcacactcaccatgcatgctgccacgtcagctttcacactatgacaccactggccatacacgttgccacctcagctttctcctcttctcactatgacacgactggccatgcatgcatgcatgctgccacctcagctcccgcctcttcacccgtgtctttctctcatgtcgcagtgctgcgtgccaacctcttctctctataaatagagagaagagaatgatggttaaactcaaaccaaaacaagaaaacatacacaaatagcaaaacggatccacaaccaaaaatggcgcttcgtgtcaagaccaacaagaagccatgttgggagatgaccaaggaggaactgacctctggcaaaactgaggtgttcaactatgaggaactcctggagtttgcagagggtgacatagctaaggtttttggtccggagtttgctgtcatagacaagtaccccagaagggtgaggctgcctgctcgtgaatacctgcttgtgacaagggtcacactcatggatgccgaggtcaacaactacagagttggtgccagaatggtcactgagtatgatcttccagtgaatggcgaattgtctgagggaggtgattgtccctgggcagttctggttgagagtggacagtgcgatttgatgctgatatcatacatgggaattgatttccagaaccaaggtgacagagtttaccgtctgctcaacaccacgttgacattctatggggttgcccatgagggagagacccttgagtatgacatcagagtgaccggttttgccaaacgtttggatggtggcatctccatgttcttctttgagtatgactgctatgtcaatgggaggcttctcattgagatgagagatggctgtgctggcttcttcacaaatgaggagcttgatgcgggaaagggtgtggtgttcacaagaggggatttggctgccagagctaagattccaaagcaagatgtttctccctatgctgtcgctccctgccttcacaaaacaaaactcaacgaaaaggagatgcagaccttggttgacaaagattgggcttccgtttttggctcaaagaatggcatgccggagatcaactacaaactctgcgcacgtaagatgctcatgattgatagagtcaccagcattgaccataagggaggtgtgtacggtttgggtcagttggttggtgagaaaatcttggagagggaccattggtacttcccatgccattttgttaaggatcaagtcatggctggatctcttgtcagcgacggttgttcacaaatgctcaagatgtacatgatctggctcggtttgcaccttaccaccggaccatttgacttcagacccgtcaacggacacccgaacaaagttaggtgtaggggtcagatatctcctcataagggaaagttggtctacgtcatggagatcaaagagatgggattcgacgaggataacgatccgtacgccattgctgacgtcaacatcattgacgttgatttcgaaaagggtcaagatttcagccttgatagaatcagcgactacggaaagggggatcttaacaaaaagatcgtcgtggacttcaagggcattgctctcaagatgcagaagagatccacgaacaagaacccctccaaagttcagcccgtttttgctaacggtgcagccactgtgggaccggaagcgtccaaggccagctctggtgccagtgctagtgcttctgctgcccctgcgaagcctgctttctcagcagatgttcttgcgccaaagccagttgcacttcctgaacatatcctcaagggtgacgctctcgctccgaaagaaatgtcctggcatcccatgtcaaaacttcctggcaacccgacgccgttcttctcccctagttcttaccctccgagggcaatttgcttcatccctttccctggcaacccacttgacaacaattgcaaagctggagaaatgcctctgaactggtacaacatgtcagagttcatgtgtggaaaagttagcaactgcttgggaccagagttcgcaagatttgataagtcaaatacgagcagaagccctgcttttgatttggctcttgtgactagagttgttgaagtcacaaacatggaacatggcaagttcctgaatgttgattgcaatcccagcaaaggcacaatggtgggggagtttgactgtcctcaagatgcgtggttctttgatggttcttgcaatgatgggcacatgccttattccatcatcatggaaatcggacttcagacatccggtgttctcaccagtgtgttgaaagcaccactgacgatggacaaagatgacattctctttaggaaccttgatgcaagtgctgaaatggtgaggccagatgtggatgtgagggggaaaaccataaggaatgtgaccaagtgcactggatatgcaatgttgggaaagatggggattcacagattcacgtttgagttgtctgttgatggcgtggttttctacaaaggaagcacttcctttggatggttcactccagaggtgtttgctcagcaagctggacttgacaatgggaaaaagacggagccttggtgcaaaactaacaacacgagtgtgagaagagttgaaatcgcatcagccaaaggcaaagaacagctgactgagaaacttccagatgcaactaatgctcaagttctcagaaggtcagaacagtgtgagtatttggattacctcaacattgctcctgattctgggctgcatgggaaaggatatgcgcatggacacaaagatgttaacccacaagactggttcttctcttgtcacttttggtttgatcctgtgatgcctggatctttgggaattgagtcaatgttccagctcattgaggcatttgcggtggaccagaacataccgggagaatacaatgtgagcaatccgacctttgcccatgcccctggaaaaacggcgtggaagtaccgtggtcaattgacaccaaagaaccgtgcgatggactgtgaggtgcacatagtttcaatcacagcctctcctgaaaatggaggctacgttgacatagtggcagatggagcactttgggttgatggtctccgtgtgtatgaagccaaagaactcagagttcgtgttgtcagtgcaaaacctcaagccattccggatgttcaacaacagccacccagcgcaaaagcggaccctgggaaaactggagttgcactcagtccgactcagttgagagatgtcctgcttgaagtggacaatccattgtatcttggtgttgaaaactccaatttggtgcagtttgaatccaaacctgcaacttcttcaaggattgtcagtatcaaaccatgctccataagtgatcttggtgacaagtccttcatggaaacgtacaatgtgtcagcacctctgtacactggagcaatggccaagggaattgcgtctgcggaccttgtcattgctgctgggaagaggaagatattgggttcttttggagcgggtgggcttccaatgcaccatgtgagggcagctttggagaagatacaagcggctctgcctcaaggaccatatgctgtgaacctcattcattcaccttttgacagcaacttggaaaaggggaatgttgatctcttcctcgaaaagggcgttactgtggtggaggcttctgcattcatgaccctcactccccaagttgttcgttaccgtgcagccggactctcaaggaacgctgatgggagtgtcaacatcagaaaccgtatcattggaaaagtgtccagaacagaactcgccgaaatgttcatcagaccggctccggaacacctccttgagaaactcatagcttctggtgagataacacaagaacaagccgaacttgcccgtcgtgttcctgtcgcagacgacatcgctgttgaagctgattctggtggtcacactgacaaccgtcccatccacgtcatcttgcctttgatcatcaaccttaggaacagactgcacagagagtgtggttatcctgcgcaccttagagtcagagttggagctggaggcggtgttggctgcccacaagctgctgcggctgccctcacaatgggagctgccttcatagtgactgggactgtcaatcaagttgctaaacagtccgggacatgtgacaacgtgagaaaacaactcagtcaagccacctacagtgacatttgcatggctccagcagctgatatgtttgaggaaggtgtgaaactccaagttctcaagaagggaacaatgttcccatcaagagctaacaaattgtacgaactcttttgcaagtacgactctttcgattcaatgcctcctgctgaacttgaaaggatcgagaagaggatcttcaagagggcacttcaagaggtctgggaagagaccaaggacttttacatcaatggtttgaagaatccagagaagatacagagagcggaacatgaccccaaactcaagatgtctttgtgtttcagatggtatcttggtcttgcatcacgttgggccaacatgggtgctcctgatcgtgtcatggactatcaagtctggtgtggtccagccattggagccttcaatgacttcatcaaaggaacatatcttgatcctgctgtctctaatgagtacccatgtgttgtccagatcaaccttcagattttgcgtggtgcatgttacctgaggcgtcttaatgctctgagaaatgatccgaggattgatcttgagactgaagatgctgcctttgtctatgagccaacgaatgcgctttgagtagttagcttaatcacttaggtcacccagtccaagcccggcctagcacgatgatcatgagtgttgctattgatgtatgttaatactatacacagtcatcgtgtgtgttttataaaactgtaagcttaggatgtttgaggctaatgtaattagcactacaccgtaataaatgagaggtttactttatgttttaataatgttcttacccttgctgctctctaaactgtaatggcgtacggttagctaaactaaagtaaaaatcgattcgcttgagtaaaattagtgaccgggaaagatcatcgactactactgctcagagatgtaatcggtaattaagacttcaagctcaataattaattaggagtaaatctggcttcgaatttttaaattgtcaacttccaaagaaggattggcaagactcaatctcaattgcccaacaaacatatggctctttacaaatttggaatctctttttgatggcaagaacgtcgtaattcctctgtcgatctcatgtaattaccaaactcatctacttattactttctttatatgcacttactgatgcggccgcttaattaatcacgagtggatgactgtcacgactgactcatgactgactactagtgctagcctcgaggtcgacacaactttgtataataaagttgtctagacctaggcgagtcatgagtcgtgacatgacgtcatgctcatcagactgcggccgcagcttatagtaaagatttttttgttaataaaatgaaagttaatatttatggatttatttgaacatatttacaagtttttgttaataaatttatttacagaagtgttaaatttgaaaatgtgttaaatgagagttaatatttatggatataatattactttatttaaaaataaaatgaatttatattaaaatatgatttggtaaaagatattataaagaggaacttggatgagaaagacgacgatgggcaaaagttgcatggcacaccgcttttgttcagtaacatctgcactgtggcgcctttttcacactcaccatgcatgctgccacgtcagctttcacactatgacaccactggccatacacgttgccacctcagctttctcctcttctcactatgacacgactggccatgcatgcatgcatgctgccacctcagctcccgcctcttcacccgtgtctttctctcatgtcgcagtgctgcgtgccaacctcttctctctataaatagagagaagagaatgatggttaaactcaaaccaaaacaagaaaacatacacaaatagcaaaacggatccacaaccaaaaatgcccactccagatgccactgcgcctctcaacaagccgtcagactatgctgtgtaccacgaagaggatggtcctttctggactgctgattcctctggtgtcagcagagtgaacttctctgaaactggtgtgggatctgaaggtgtcattcctgcgctcacactgattgatgtgtttgagcgtgcggtcaaacgtggtggcaataggattgcattcagaacagagaacatgccaaccttgaggcgtggagaagaggctcctgatgctttgccgctcaaagattggaagtcctggtcttggaaacagtacaaagctgatgttcacagaattgcgagggctctgatggatttgggagttgagcagcacgatgcggtctccatctttggcttcaactcaccagaatggttcctcagtgctgtcggtgcagttcatgctggtgccaagatcgctggaatctacccttcagacactcctgctcaagtgcagtacaaagccttccactctgacactgctgttgcagttgtggagaacgaacagtgcttcaagaaattcgcagaggtggttgaggatctcccttacctcaaagccattgtttgttgggattatgaagccacagacatcacaagggaagatggttcagtggttgaagtcctgacctttgctgagttcctgaagagaggtgacactgtggaagcagctgcacttgatgagagaatcagcaagattgagcccaccatgtgtgctgccctgatctacaccagtggcacaactgggagacccaaagctgtcatgatctcccatgacaaccttgtctttgaagcatctgctgtggtcccgaacttgggaggggcatgcacgaccactgctgaggaaaggattctttcctaccttcctttgtctcatgttgctggaatgatggttgacatcattgctccaatcatagcgacagcgttccacaaaggaaggatctgtgtttgttttgccagaccgtatgatttgagaactggaacccttgggcaaagactcaatgcagtggagccaaccatattccttggtgtgccacgtgtgtgggaaaagatccaagagaaattgatggctgttggtgccaaaaccactggtctcaagaagaaactcagcacggcagccaagaaacgtgggcttgaatttcaagaggaacaacagatagggagaagtggtgccaaccctggctttggaccgcttggaatctacaagaaacttttgggcctcatcaaaggaaagttggggctgaccaaatgcaagtttgcctttgctggcgcagctccaatgacccgtgaaacccttcagtactttggagcgctgaacatcaacatcaatgaggtctatggaatgtctgaatgcagtggggctgccacctggtcaactgacaaagctcatgagtggggcactgttggctatgagatgccctcctgtgaagtcagagtgttcaagattgcggaggatggcaccaagacagagtgcccaagagctgctgacatcatgcatgccacagaagaggaacaaggtgaagtttgcttccgtggaaggaacatcatgatgggatacttggccaacccgaaacttggtgatgaccatgttgctgagattgaagagaagaatgcagctgccatagatagcgaagggtggcttcactctggtgacaagggagcaatttccacaaggggaatgctcaagataacgggcagatacaaggagcttatcataggtgctggtggggagaatgtggctcctgttcccattgaagatgccatcaaggcgaggatgccttttgtttcaaatgcaatgatggttggagacaagaggaagttcatggctgtccttctgactttgaaaacggttggagcaactggagagcttcctggcacaaacaagctcatgggagcagctgcggactatggtgagaccattgaggatgcctgtgacaatgaggcgctcattgaagagataacgcagcaactcaaagagataggtgacgatggagatgtcacgccaagcaatgcagcccgtatacaaaagttcacgattttgccactcgacttcagtgtctccacagatgaactgacagcaacgttgaaattgaagagaagtgtggttgcagacaagtatgaggacatcatagaggctttctatgagagcaagtctgtctttgtgccttactcaacagttggagcttatgcaacgggtggaccagttgatgactctgttgtggatggatcattcaaaggtgactttagcatgattggggatgacgatccggatcttcagaatgtggatgtccttgaagcaattgatgaggacaactgagtagttagcttaatcacttaggtcacccagtccaagcccggcctagcacgatgatcatgagtgttgctattgatgtatgttaatactatacacagtcatcgtgtgtgttttataaaactgtaagcttaggatgtttgaggctaatgtaattagcactacaccgtaataaatgagaggtttactttatgttttaataatgttcttacccttgctgctctctaaactgtaatggcgtacggttagctaaactaaagtaaaaatcgattcgcttgagtaaaattagtgaccgggaaagatcatcgactactactgctcagagatgtaatcggtaattaagacttcaagctcaataattaattaggagtaaatctggcttcgaatttttaaattgtcaacttccaaagaaggattggcaagactcaatctcaattgcccaacaaacatatggctctttacaaatttggaatctctttttgatggcaagaacgtcgtaattcctctgtcgatctcatgtaattaccaaactcatctacttattactttctttatatgcacttactgatgcggccgcttaattaatctgatcatggatgctacgtcacggcagtacaggactatcactagacctaggagctgtgctgggtaactcacatgagtcactggtcacatcagcggccgcagcttatagtaaagatttttttgttaataaaatgaaagttaatatttatggatttatttgaacatatttacaagtttttgttaataaatttatttacagaagtgttaaatttgaaaatgtgttaaatgagagttaatatttatggatataatattactttatttaaaaataaaatgaatttatattaaaatatgatttggtaaaagatattataaagaggaacttggatgagaaagacgacgatgggcaaaagttgcatggcacaccgcttttgttcagtaacatctgcactgtggcgcctttttcacactcaccatgcatgctgccacgtcagctttcacactatgacaccactggccatacacgttgccacctcagctttctcctcttctcactatgacacgactggccatgcatgcatgcatgctgccacctcagctcccgcctcttcacccgtgtctttctctcatgtcgcagtgctgcgtgccaacctcttctctctataaatagagagaagagaatgatggttaaactcaaaccaaaacaagaaaacatacacaaatagcaaaacggatccacaaccaaaaatgcttcagcacacttggcttccgaagcctcccaatctgaccctcttgtcagatgaggttcatctctggaggattcctcttgaccagcctgagtcacaacttcaagaccttgctgccaccctgagcagtgatgaattggcgagggcaaacagattctactttccagaacacagaaggcgtttcactgctgggagaggcatcctcagatccatcttgggtggatacttgggagtggaaccgggtcaagtcaagtttgattatgagtcccgtgggaaaccgatccttggtgacagatttgctgagagtggactcctgttcaacttgtctcacagccagaaccttgccttgtgtgctgtcaactacacgcgtcaaataggcattgatcttgaatatctgcgtccaacatctgacttggagtctcttgcaaagaggttctttctcccaagagaatatgaactcttgaggtcactccctgatgagcagaaacagaagattttctttcgttactggacttgcaaagaggcttatctcaaagcaacgggagatggaatagccaaacttgaagagatcgagatagcactcaccccaacagaacctgccaagctccaaacagctcctgcgtggtctctgttggagcttgtgccagatgacaattgtgttgcagctgtggctgttgcgggttttggttggcagcccaagttctggcattactgagtagttagcttaatcacttaggtcacccagtccaagcccggcctagcacgatgatcatgagtgttgctattgatgtatgttaatactatacacagtcatcgtgtgtgttttataaaactgtaagcttaggatgtttgaggctaatgtaattagcactacaccgtaataaatgagaggtttactttatgttttaataatgttcttacccttgctgctctctaaactgtaatggcgtacggttagctaaactaaagtaaaaatcgattcgcttgagtaaaattagtgaccgggaaagatcatcgactactactgctcagagatgtaatcggtaattaagacttcaagctcaataattaattaggagtaaatctggcttcgaatttttaaattgtcaacttccaaagaaggattggcaagactcaatctcaattgcccaacaaacatatggctctttacaaatttggaatctctttttgatggcaagaacgtcgtaattcctctgtcgatctcatgtaattaccaaactcatctacttattactttctttatatgcacttactgatgcggccgcttaattaactactgtcactgaggccgtagacgagtacggactgatctaactagtgctagcctcgaggtcgacacccagctttcttgtacaaagtggttgcggccgcttaattaaatttaaattcaattaatgcaatcttgattttcaacaacgaaggtaatggcgtaaaagaaaaaatgtatgttattgtattgatctttcatgatgttgaagcgtgccataatatgatgatgtataattaaaatattaactgtcgcattttattgaaatggcactgttatttcaaccatatctttgattctgttacatgacacgactgcaagaagtaaataatagacgccgttgttaaagaattgctatcatatgtgcctaactagagggaatttgagcgtcagacctaatcaaatattacaaaatatctcactctgtcgccagcaatggtgtaatcagcgcagacaaatggcgtaaagatcgcggaaaaacctccccgagtggcatgatagctgcctctgtattgctgatttagtcagccttatttgacttaagggtgccctcgttagtgacaaattgctttcaaggagacagccatgccccacactttgttgaaaaacaaattgcctttggggagacggtaaagccagttgctcttcaataaggaatgtcgaggaggcaatgtaaccgcctctggtagtacacttctctaatccaaaaatcaatttgtattcaagataccgcaaaaaacttatggtttaaaccctgcaggactagtccagaaggtaattatccaagatgtagcatcaagaatccaatgtttacgggaaaaactatggaagtattatgtaagctcagcaagaagcagatcaatatgcggcacatatgcaacctatgttcaaaaatgaagaatgtacagatacaagatcctatactgccagaatacgaagaagaatacgtagaaattgaaaaagaagaaccaggcgaagaaaagaatcttgaagacgtaagcactgacgacaacaatgaaaagaagaagataaggtcggtgattgtgaaagagacatagaggacacatgtaaggtggaaaatgtaagggcggaaagtaaccttatcacaaaggaatcttatcccccactacttatccttttatatttttccgtgtcatttttgcccttgagttttcctatataaggaaccaagttcggcatttgtgaaaacaagaaaaaatttggtgtaagctattttctttgaagtactgaggatacaacttcagagaaatttgtaagtttgtaggtaccagatctggatcccaaaccatgtctccggagaggagaccagttgagattaggccagctacagcagctgatatggccgcggtttgtgatatcgttaaccattacattgagacgtctacagtgaactttaggacagagccacaaacaccacaagagtggattgatgatctagagaggttgcaagatagatacccttggttggttgctgaggttgagggtgttgtggctggtattgcttacgctgggccctggaaggctaggaacgcttacgattggacagttgagagtactgtttacgtgtcacataggcatcaaaggttgggcctaggatctacattgtacacacatttgcttaagtctatggaggcgcaaggttttaagtctgtggttgctgttataggccttccaaacgatccatctgttaggttgcatgaggctttgggatacacagcccggggtacattgcgcgcagctggatacaagcatggtggatggcatgatgttggtttttggcaaagggattttgagttgccagctcctccaaggccagttaggccagttacccaaatctgagtagttagcttaatcacctagagctcgatcggcggcaatagcttcttagcgccatcccgggttgatcctatctgtgttgaaatagttgcggtgggcaaggctctctttcagaaagacaggcggccaaaggaacccaaggtgaggtgggctatggctctcagttccttgtggaagcgcttggtctaaggtgcagaggtgttagcgggatgaagcaaaagtgtccgattgtaacaagatatgttgatcctacgtaaggatattaaagtatgtattcatcactaatataatcagtgtattccaatatgtactacgatttccaatgtctttattgtcgccgtatgtaatcggcgtcacaaaataatccccggtgactttcttttaatccaggatgaaataatatgttattataatttttgcgatttggtccgttataggaattgaagtgtgcttgaggtcggtcgccaccactcccatttcataattttacatgtatttgaaaaataaaaatttatggtattcaatttaaacacgtatacttgtaaagaatgatatcttgaaagaaatatagtttaaatatttattgataaaataacaagtcaggtattatagtccaagcaaaaacataaatttattgatgcaagtttaaattcagaaatatttcaataactgattatatcagctggtacattgccgtagatgaaagactgagtgcgatattatggtgtaatacataggaattcgtttaaacgatctgcgtctaattttcggtccaacttgcacaggaaagacgtcgaccgcggtagctcttgcccagcagactgggcttccagtcctttcgctcgatcgggtccaatgttgtcctcagctgtgaaccggaagcggacgaccaacagtggaagaactgaaaggaacgagccgtctataccttgatgatcggcctctggtgaagggtatcatcgcagccaagcaagctcatgaaaggctgatgggggaggtgtataattatgaggcccacggcgggcttattctttagggaggatctatctcgttgctcaagtgcatggcgcaaagcagttattggagtgcggattttcgttggcatattattcgccacgagttagcagacgaagagaccttcatgaacgtggccaaggccagagttaagcagatgttacgccctgctgcaggcctttctattatccaatagttggttgatctttggaaagagcctcggctgaggcccatactgaaagagatcgatggatatcgatatgccatgttgtttgctagccagaaccagatcacatccgatatgctattgcagcttgacgcagatatggaggataagttgattcatgggatcgctcaggagtagctcatccatgcacgccgacaagaacagaaattccgtcgagttaacgcagccgcttacgacggattcgaaggtcatccattcggaatgtattagtttgcaccagctccgcgtcacacctgtcttcatttgaataagatgttagcaattgtttttagctttgtcttgttgtggcagggcggcaagtgcttcagacatcattctgttttcaaattttatgctggagaacagcttcttaattcctttggaaataatagactgcgtcttaaaattcagatgtctggatatagatatgattgtaaaataacctatttaagtgtcatttagaacataagttttatgaatgttcttccattttcgtcatcgaacgaataagagtaaatacaccttttttaacattacaaataagttcttatacgttgtttatacaccgggaatcatttccattattttcgcgcaaaagtcacggatattcgtgaaagcgacataaactgcgaaatttgcggggagtgtcttgagtttgcctcgaggctagcgcatgcacatagacacacacatcatctcattgatgcttggtaataattgtcattagattgtttttatgcatagatgcactcgaaatcagccaattttagacaagtatcaaacggatgtgacttcagtacattaaaaacgtccgcaatgtgttattaagttgtctaagcgtcaatttga

SEQ ID NO: 36 - DNA, 33003 bp, Artificial sequence
  Plasmid pDAB7362 T-strand
cagtcagcatcatcacaccaaaagttaggcccgaatagtttgaaattagaaagctcgcaattgaggtctacaggccaaattcgctcttagccgtacaatattactcaccggatcctaaccggtttaattaaggcgcgccatgcccgggcaagcggccgcacaagtttgtacaaaaaagcaggcttctagacctaggtggagtcatcacgcagactatctcagcatgtgcgtagcacgcggccgcagcttatagtaaagatttttttgttaataaaatgaaagttaatatttatggatttatttgaacatatttacaagtttttgttaataaatttatttacagaagtgttaaatttgaaaatgtgttaaatgagagttaatatttatggatataatattactttatttaaaaataaaatgaatttatattaaaatatgatttggtaaaagatattataaagaggaacttggatgagaaagacgacgatgggcaaaagttgcatggcacaccgcttttgttcagtaacatctgcactgtggcgcctttttcacactcaccatgcatgctgccacgtcagctttcacactatgacaccactggccatacacgttgccacctcagctttctcctcttctcactatgacacgactggccatgcatgcatgcatgctgccacctcagctcccgcctcttcacccgtgtctttctctcatgtcgcagtgctgcgtgccaacctcttctctctataaatagagagaagagaatgatggttaaactcaaaccaaaacaagaaaacatacacaaatagcaaaacggatccacaaccaaaaatggcagcgaggctgcaagagcagaaaggaggtgagatggacacgaggattgcgatcataggcatgagcgccatacttccttgtggaaccacggtgagagagtcatgggagaccataagggctggcattgattgcctgtctgatcttcctgaggatcgtgttgatgtgactgcgtactttgacccagtcaagaccacaaaggacaaaatctactgcaagagaggaggtttcattcctgagtatgactttgatgcgcgtgagtttggtctcaacatgttccagatggaagattctgatgcgaatcagaccatctcacttctcaaggtcaaagaagcacttcaagatgctgggattgatgcacttggaaaggagaagaaaaacataggatgcgtgcttggcattggaggtggacagaagagttcacatgagttctacagcagactcaactatgtggttgtggagaaagtcttgagaaagatggggatgccagaggaagatgtcaaagtggctgtggagaagtacaaagcgaacttcccagaatggagacttgactctttccctggattccttgggaatgtcactgctggcagatgcaccaacacattcaacttggatggcatgaactgcgttgtggatgctgcatgtgcaagctccttgatagcagtcaaggttgcgattgatgaactgctctatggtgactgcgacatgatggtcactggtgcaacctgcacagacaactccattgggatgtacatggctttctcaaagacacctgtgttcagcacggacccaagtgtgagagcgtatgatgagaaaacgaaagggatgctcattggtgagggatcagccatgttggtgctcaaacgttatgcagatgcagtgagggatggtgatgagattcatgctgtgattcgtggttgtgcaagctcaagtgatggcaaagcagctggcatctacactcccacaatcagtggtcaagaggaagccttgagacgtgcatacaatcgtgcctgcgttgaccctgccactgtcactttggttgagggtcatgggactggcactccagttggagataggattgagttgactgcgttgaggaacttgtttgacaaagcgtatggtgaagggaacacagagaaagttgcagttggaagtatcaagtccagtattggtcatttgaaggctgttgctggtcttgctggaatgatcaaggtcatcatggctctcaaacacaagactttgcctggaacgatcaatgtggacaatccacccaatctctatgacaacactcccatcaatgagtcatccctctacatcaacacgatgaacagaccctggttccctccacctggtgttccgagacgtgctggaatatccagctttggctttggaggtgccaactaccatgcagtgttggaagaggctgaaccagagcacacgacagcgtacagactcaacaaacgtccacaaccggtgttgatgatggctgcaactcctgctgcgttgcagagcctttgtgaagctcagctgaaagagtttgaagctgcgatcaaggagaatgagacagtcaagaatactgcctacatcaagtgtgtcaagtttggagaacagttcaagttccctgggagcatacctgcgaccaatgcgagactgggattcttggtcaaagatgcggaggatgcgtgctccacgcttcgtgctatatgtgctcagtttgccaaagatgtgaccaaagaagcgtggaggcttccgagagaaggagtttctttccgtgccaaaggcattgccaccaatggtgctgttgctgcactcttctctggacaaggtgctcagtacacacacatgttcagtgaagttgcgatgaactggcctcagttcagacagtccattgctgcaatggacgctgcacagtccaaggttgctggaagtgacaaagactttgaaagagtctctcaagtcctgtacccaaggaaaccgtacgaacgtgagccagaacaagatcacaagaaaatctcactcacagcatacagccagccgtcaaccctggcatgtgctcttggtgcctttgagattttcaaggaagctggattcactccagactttgcagctggacacagcttgggtgagtttgctgcgctctatgcagctggttgtgttgacagagatgagttgtttgaacttgtttgcagaagggcaaggatcatgggaggcaaagatgcacctgccacacccaaaggttgcatggcagctgtcataggacccaacgcagagaacatcaaggttcaagctgccaacgtctggcttggaaactcaaactctccgtctcagactgtcattactgggtctgttgaagggattcaagctgaaagtgccagattgcagaaggaagggttcagagttgtgcctcttgcttgtgagtctgccttccattctccacagatggaaaatgccagctcagctttcaaagatgtcatatccaaggtttccttccgtacacccaaagcagaaacaaagctcttcagcaatgtttctggagagacctatccgacggatgccagagagatgctcactcaacacatgacctcatctgtgaagttcctgacccaagtgaggaacatgcaccaagctggtgcgagaatctttgttgagtttggaccgaaacaagttctcagcaaacttgtttctgaaaccctcaaagatgacccgtctgttgtcacagtgtctgtgaacccagcttctggcacggactctgacatacagttgagggatgctgcagttcagctggttgtggctggtgtcaatcttcaagggtttgacaagtgggatgctcctgatgccacgaggatgcaagccatcaagaaaaagagaaccacactcagactttcagctgccacctatgtcagtgacaagaccaagaaagtgagggatgctgccatgaacgacggaagatgtgtcacatacctcaagggtgctgcaccactcatcaaggctcctgaacctgtggttgacgaagctgccaagagggaggctgaaaggcttcagaaggagcttcaagacgctcagaggcagcttgacgacgccaaacgtgcagctgcagaagccaactccaaacttgctgctgccaaggaggaagccaagactgctgcagcttcagccaagcctgcagttgacactgctgttgtggagaaacatcgtgccatcctcaagtccatgctggctgagctggatggttatggaagtgttgatgcttcttcccttcagcaacagcaacagcaacagactgctccggcgcctgttaaagccgctgcccctgccgctcccgttgcaagtgctcctgctcccgccgtgtccaacgagttgcttgagaaagctgagacagttgtgatggaggttctcgctgccaagactggatacgaaacagacatgattgaggcggacatggagcttgagactgagttgggaattgacagcatcaagagggttgaaattctttctgaagtccaagctatgcttaacgttgaggcgaaagatgttgatgctctctctaggacgagaacagtgggtgaagttgtcaacgctatgaaggcagaaatcgctggttcttccgctccggcgccggcagctgccgcacctgcaccggctaaagcggctccagctgcagctgcaccagctgtttctaatgagctgctcgaaaaggcagaaactgttgtgatggaagtccttgctgccaaaactggctacgaaactgacatgatagaatcagacatggagcttgagacggagcttggaattgattccatcaagcgtgtggaaatcctcagtgaagtccaagccatgctcaatgtggaagctaaggatgtggatgctctctcaaggaccagaactgtcggtgaggttgtcaatgccatgaaggctgagatagctggaggctccgctcctgcgccggccgctgccgctcctggtcccgctgccgcggctccagctccagctgcagccgctccggccgtctcaaacgaactccttgaaaaagctgagaccgtcgtgatggaggtcttggcagctaaaaccggctatgagactgacatgattgagtctgacatggaattggagacagaacttgggatagacagcatcaaacgtgttgaaatcctcagtgaggtccaagctatgctgaacgtggaagcgaaggatgttgatgctctgtccagaacgaggaccgttggtgaggttgtggatgccatgaaggctgaaattgctggagggtctgcgcccgcgccagctgcagccgctcctgcacccgcagccgcggcacctgctccagctgcacctgcacctgccgtttcttcagaactcttggagaaggctgagacggttgtgatggaggttttggctgcaaagactggctatgagaccgacatgattgaatctgatatggaattggagacagagcttgggatcgattccatcaaaagagtggagatcctgagtgaagtccaagccatgctcaatgttgaagctaaggatgttgatgcactttcaagaacaaggacagtgggtgaggttgtggatgccatgaaggcggagattgctggagggagcgcgcctgcgccagctgccgcggcacctgcaccggcagccgcagctccagctccagctgcaccagcaccggccgcgcccgcgccagctgtttcatccgaactcctggaaaaggccgagacggttgtgatggaggtgctcgcagctaagactggttacgagaccgacatgattgaaagtgacatggagcttgaaaccgagttgggaatagatagcatcaaacgtgttgaaatcttgtctgaggtccaagctatgttgaacgtggaggcaaaagatgtcgatgcgctttcaagaaccagaacagtcggtgaggtcgtggacgccatgaaggctgaaattgccggaagctctgctagtgcgccagctgcagccgcacctgcacctgctgccgcggcacctgctccagctgcagccgctcctgccgtcagcaatgagttgctggagaaagccgaaacagttgtgatggaagtccttgctgcaaaaactggttacgaaacggacatgattgagtcagacatggaattggagaccgaacttggaatagattccatcaagagagtggagatcctctctgaggtgcaagccatgctcaacgttgaggctaaagatgttgatgcactcagtaggacaagaactgtgggggaagttgtcgatgcgatgaaggctgagattgctggaggctctgctcctgcgccggcagctgccgcacctgcacccgcagccgcggcaccagctgtcagcaacgaattgcttgagaaggctgaaacagttgtcatggaagtgctggctgcaaaaaccggctatgagactgacatgattgagtctgacatggaacttgagacggaattgggcattgacagcatcaagcgtgttgagatcctcagtgaagtccaagcaatgctcaatgtggaggctaaggatgtggatgccctctcaaggaccagaacagttggtgaggtcgttgatgcgatgaaggcggagatcgctggaagttccgcgcctgcgccagctgcagccgctcctgcacccgcagccgcggcaccggctccagctgcagccgcaccggccgtctcctcagaactcctggaaaaggctgagacagttgtgatggaagtccttgctgcgaaaactggctatgagaccgacatgattgaatctgacatggaactggagaccgagcttggaattgactccatcaaacgtgttgaaatcctctctgaggttcaagcgatgttgaatgtggaggccaaagatgttgatgctctttccagaacaaggacggtgggagaggtggttgatgccatgaaggctgagatagctgggggttctgctcctgcgccagctgcagccgctcctgctcccgctgccgcggcaccagctgtcagcaacgaactccttgaaaaagctgaaactgttgtgatggaggttttggctgcaaagactggatacgagactgacatgatagagtcagacatggagttggaaacagagcttgggattgatagcatcaagcgtgtggaaatcctttctgaggttcaagccatgctgaacgttgaggccaaagatgtcgatgctttgtcaaggaccagaacggttggagaagtggtcgatgccatgaaggctgagatagctggtggatcagcccctgctccggctgcagccgctcctgcaagtgccggtgctgcaccagctgtgaagattgattcagttcatggtgctgactgtgacgatttgtcactgatgcacgcaaaggtggttgacatcagaaggccagatgaactgattctggaaagaccggagaaccgtccagttcttgtcgttgacgatggctcagagttgacacttgctcttgtgagggtgttgggagcctgtgcagttgtcttgacctttgagggattgcagttggctcagagagctggtgcagctgccattcgtcatgttctggctaaggacctttcagcagaatcagctgagaaggccatcaaagaggctgagcaaagatttggagcgttgggaggcttcataagccagcaagcagaaaggtttgaaccagctgagatactgggtttcacactcatgtgtgcgaagtttgccaaagcctctctctgcactgctgtggctggaggtcgtcctgccttcatcggtgtggctaggcttgacggcagacttggattcacctctcaaggcacttctgacgcactcaagagagcacagcgtggagcgatctttggactctgcaagacaatagggttggagtggtcagaatctgatgtgttcagccgtggtgtggacattgctcaagggatgcacccagaagatgctgcagttgccatagttagggagatggcgtgtgctgacatcagaatcagagaggttgggattggagcaaaccagcaaagatgcacaatcagagctgccaagttggagactgggaaccctcagagacagatagcgaaagacgatgtgcttctggtttctggaggtgctcgtgggatcacacctctttgcatccgtgagatcacgcgtcagattgctggaggcaagtacattctgttgggtcgtagcaaagtttctgcgtctgaaccagcatggtgtgctggcatcactgatgagaaggctgtgcagaaagctgccacccaagagttgaagagggccttcagtgctggtgaaggacccaaacccactccaagggctgtcacgaaacttgtgggatctgttcttggtgctcgtgaagtgagaagctccattgctgccattgaagctctgggtggcaaagcgatctacagctcttgtgatgtgaactctgctgcagatgttgccaaagcagttagggatgcagagtcccagcttggtgccagagttagtggaatcgttcacgcttctggtgtgctccgtgatcgtctcatagagaagaaactccctgacgagtttgatgctgtctttgggaccaaagtcactgggttggagaatcttctggctgcagttgatcgtgccaacctcaaacacatggttctcttcagctcccttgctggtttccacggcaatgttggtcagtctgactatgcgatggcaaacgaagctctcaacaagatgggtttggaacttgcgaaggatgtcagtgtcaagtccatctgctttggtccctgggatggtgggatggtgacacctcaactcaagaaacagtttcaagaaatgggagttcagatcattcctcgtgaaggaggtgctgatacagttgcgaggattgtgttgggatcaagtcctgctgagatccttgttggaaactggaggacaccatccaagaaagttggaagtgacacgatcaccctgcatagaaagatcagtgccaagtccaatcccttcttggaggatcatgtcatacaaggcagaagggtgttgccaatgacccttgctattgggagccttgctgagacctgccttggactcttccctggctactctctctgggccatagatgacgcacagctcttcaaaggtgtcactgttgatggagacgtcaactgtgaagtgaccctcacaccgtccactgctccgagtgggagggtgaatgtccaagcgacgctcaagacgttctcaagtggaaaacttgttccagcctacagagctgtcatagtgttgtccaaccaaggtgctccacctgccaatgcaaccatgcagcctccgagccttgatgcagatcctgctttgcaagggtcagtctatgatggcaagactctctttcatggtcctgcgttcagaggcattgatgacgttctcagctgcaccaagagccagcttgttgccaagtgttctgctgttcctggatcagatgcagccagaggagagtttgcaactgacactgatgcacatgatccctttgtcaatgatcttgcctttcaagcaatgttggtctgggtgaggagaacgctgggacaagctgcactcccgaactccattcagaggatagtccaacacagaccggtcccacaagacaaacccttctacatcaccctcagatccaatcagagtggtggacatagccagcacaaacatgcacttcagttccacaacgaacaaggtgatctcttcattgatgttcaagcctctgtcattgcgacagactcacttgcgttctgagtagttagcttaatcacttaggtcacccagtccaagcccggcctagcacgatgatcatgagtgttgctattgatgtatgttaatactatacacagtcatcgtgtgtgttttataaaactgtaagcttaggatgtttgaggctaatgtaattagcactacaccgtaataaatgagaggtttactttatgttttaataatgttcttacccttgctgctctctaaactgtaatggcgtacggttagctaaactaaagtaaaaatcgattcgcttgagtaaaattagtgaccgggaaagatcatcgactactactgctcagagatgtaatcggtaattaagacttcaagctcaataattaattaggagtaaatctggcttcgaatttttaaattgtcaacttccaaagaaggattggcaagactcaatctcaattgcccaacaaacatatggctctttacaaatttggaatctctttttgatggcaagaacgtcgtaattcctctgtcgatctcatgtaattaccaaactcatctacttattactttctttatatgcacttactgatgcggccgcttaattaagatgagtgatactcaggactcaggactcactctgctgatcactagtgctagcctcgaggtcgacacaactttgtatacaaaagttgtctagacctaggctcagcaactcatccagtcaagttcgagtcagtgagttgggcggccgcagcttatagtaaagatttttttgttaataaaatgaaagttaatatttatggatttatttgaacatatttacaagtttttgttaataaatttatttacagaagtgttaaatttgaaaatgtgttaaatgagagttaatatttatggatataatattactttatttaaaaataaaatgaatttatattaaaatatgatttggtaaaagatattataaagaggaacttggatgagaaagacgacgatgggcaaaagttgcatggcacaccgcttttgttcagtaacatctgcactgtggcgcctttttcacactcaccatgcatgctgccacgtcagctttcacactatgacaccactggccatacacgttgccacctcagctttctcctcttctcactatgacacgactggccatgcatgcatgcatgctgccacctcagctcccgcctcttcacccgtgtctttctctcatgtcgcagtgctgcgtgccaacctcttctctctataaatagagagaagagaatgatggttaaactcaaaccaaaacaagaaaacatacacaaatagcaaaacggatccacaaccaaaaatggctgcaaggaacgtgagtgcggctcatgagatgcatgacgagaagaggatagctgttgtgggcatggctgttcagtatgctggatgcaaaacgaaagacgagttctgggaagttctcatgaatggaaaagttgagagcaaagtgatcagcgacaaacgtcttggttcaaattaccgtgctgaacactacaaagctgaaaggagcaagtatgctgacaccttctgcaatgagacatatggaactcttgatgagaacgaaatagacaatgagcatgaactccttttgaaccttgccaaacaagccttggctgaaacatctgtcaaagattcaacaagatgtggcatagtttctggatgcctcagcttcccgatggacaacctccaaggtgaactcttgaatgtgtaccagaaccatgttgagaagaaacttggtgccagagttttcaaagatgcctctcactggtcagaaagagaacagtccaacaaaccagaggctggtgacagaagaatcttcatggaccctgcttcctttgttgctgaggaactcaatcttggcgctctccactactctgttgatgctgcctgtgccactgcgctctatgtgctcagactggcgcaagatcacttggtctctggtgcagctgatgtgatgctttgtggtgcaacatgcctgccggagccgtttttcatactctctgggttctcaaccttccaagccatgcctgttggaacgggtcagaatgtgtccatgccgctgcacaaagattctcaaggattgacccctggtgaaggaggttccatcatggtcctcaaacgtttggatgacgcaatcagagatggagatcacatctatggaacacttttgggagccaatgtcagcaacagtggcactggtctgccacttaaaccccttttgccgtcagagaaaaagtgcctcatggacacctacacacgtatcaatgtgcatccccacaagattcagtatgttgaatgccatgcaactgggactccacaaggtgatcgtgtggaaattgatgctgtgaaggcttgctttgaaggcaaagtcccacgttttggaaccacaaaagggaactttggacacacattggtggcagctgggtttgctggcatgtgcaaagtgcttctctccatgaagcacgggatcattccacccactccgggaatagatgacgaaacgaagatggaccctctggttgtctctggtgaggccattccctggccagaaacgaatggagaaccgaagcgtgctggtctctcagcgtttggatttggtgggaccaatgctcatgctgtctttgaggaacatgacccaagcaatgctgcatgcactggccatgactccatttctgctctctctgcacgttgtggtggtgagtcaaacatgagaatagcaatcactgggatggatgccacttttggtgctttgaaaggattggatgcttttgaaagggccatctacactggtgctcatggtgctataccactcccagaaaagagatggagattcctggggaaagacaaggacttccttgatctttgtggagtcaaagcaacaccgcatggctgttacattgaagatgttgaagttgatttccagaggctgaggactccaatgactcctgaagatatgctcttgcctcaacagcttctggctgtcaccacaattgatagggccatattggactctggcatgaagaaaggtggaaatgtggctgtctttgtggggttggggaccgatcttgaactctaccgtcaccgtgcaagggttgctctcaaggagagagtgaggcctgaagccagcaagaaactcaatgacatgatgcagtacatcaatgattgtgggacaagcacttcttacaccagctacataggcaacttggttgcaacaagggtcagttcacaatggggcttcacgggaccttccttcacaatcacagaaggcaacaattctgtgtacagatgtgctgaacttggcaaatacctcttggaaacgggagaggttgatggggttgtggttgcgggtgttgatctctgtgggagtgctgagaacctttacgtcaagtcaaggcgtttcaaggtgtctacatctgacaccccgagagccagctttgatgcagctgctgatggttactttgttggagagggctgtggtgcatttgtgctcaagcgtgagacaagctgcaccaaggatgacagaatctatgcttgcatggatgccatagttcctggaaatgttccatctgcatgtttgagagaggcattggatcaagccagagtcaagcctggagacatcgagatgttggagctttctgctgattcagcgaggcatttgaaggacccgtctgttctcccaaaggaactcactgctgaggaagagattggcggacttcagacgattcttcgtgacgatgacaagctcccaaggaatgttgcaactggaagtgtcaaggccactgttggtgacactggttatgcttctggtgctgccagtttgattaaggctgcgctttgcatctacaaccgttacctgcccagcaatggagatgactgggatgaacctgcacctgaagcaccctgggacagcacactctttgcgtgccagacctcaagagcttggttgaagaaccctggtgagagacgttatgcggctgtttccggagtcagtgaaaccagaagttgctacagtgtgctgctttctgaagcagagggacactacgagagagagaacagaatcagtttggatgaggaagcacccaagctcattgtgttgagagcagactcccatgaagagattcttggaagattggacaagataagggaaaggttcttgcagcccacgggtgctgcacccagagagtctgaattgaaggcgcaagcccgtaggatctttcttgaactccttggtgagacccttgcccaagatgcagcttcatctggaagtcagaagccccttgctctcagcttggtctccactccatccaagctccagagagaggtggaacttgcggcaaaaggcattccgagatgtctcaagatgagacgtgattggagttcccctgctggaagcagatatgcgcctgagcctttggccagtgacagagttgccttcatgtatggagaaggaaggagcccttactatggcatcacacaagacattcataggatttggcctgaacttcatgaggtcatcaatgagaaaacaaaccgtctctgggctgaaggtgacagatgggtcatgccaagggccagcttcaagagtgagcttgagtcacaacagcaagagtttgacagaaacatgattgaaatgttccgtcttggaatcctcacctcaattgccttcacaaacctggcgagagatgttctcaacatcacgcccaaagcagcctttggactcagtttgggagagatttccatgatctttgctttctccaagaaaaacggtttgataagcgatcagttgacaaaggatttgagagagtcagatgtctggaacaaagctctggctgttgagttcaatgcgctcagagaagcctggggcattccacagtctgtcccaaaagatgagttctggcaaggttacatagtgaggggaacgaaacaagacatagaagcagccatagcaccagactcaaagtatgtgaggttgaccatcatcaatgatgccaacactgctctcatcagtggaaagcctgatgcatgcaaagctgcgattgctcgtcttggtggcaacatccctgcgcttccagtcactcaaggcatgtgtgggcattgcccagaggtgggaccttacaccaaggacatcgcaaagatccacgccaaccttgagttccctgtggttgatggtcttgatctctggactaccataaaccagaagaggcttgtgccaagagccacgggtgccaaagatgaatgggctccttcatcctttggggagtatgctggacagctctatgagaaacaagccaacttccctcagatagttgaaaccatctacaagcagaactatgatgtgtttgttgaagttgggccaaacaatcacagaagcacagcagtgagaaccacgcttggaccacagagaaaccaccttgctggtgccatagacaagcagaacgaggatgcttggacgacaatagtcaagctcgtggcttcattgaaggctcaccttgttcctggagtgaccatcagtccgctctaccactccaagctcgttgcagaggctgaggcttgttatgctgcgctctgtaaaggtgagaaacccaagaaaaacaagtttgtgagaaagattcagttgaatggcagattcaacagcaaggcagaccccatctcctcagcagaccttgcatccttcccacctgcggaccctgcgattgaagctgccatctcttcaaggatcatgaagcctgtggctccgaaattctatgcgcgtctcaacattgatgagcaagatgagaccagagatccgatcttgaacaaggacaatgcgccttccagctccagctcttccagcagttcctcttccagcagttcatctccgtctcctgctccttcagctccagttcagaagaaagctgccccagctgcggagacaaaagctgttgccagtgctgatgcacttcgtagtgccctgcttgatcttgactccatgcttgcgctcagctctgcaagtgcttctggcaaccttgttgagactgcgccatctgatgccagtgtcattgtccctccgtgcaacattgctgatcttggcagcagagctttcatgaaaacttatggtgtttctgcgcctctgtacaccggtgcaatggccaagggaattgcctctgcggacttggtgatcgcagctggaaggcaaggaatccttgcgtcatttggtgctggaggccttccaatgcaagttgtgcgtgagtccattgaaaagattcaagctgccctgcccaatggaccatatgctgtcaacctcatccattctccttttgacagcaaccttgagaagggaaatgttgatctcttcttggaaaagggtgtcacttttgttgaggcttcagccttcatgacgttgacaccgcaagttgtcagatacagagcggctgggttgacgaggaatgcagatgggtcagtcaacataaggaacagaatcattgggaaagtctccagaactgagctggctgaaatgttcatgcgtcctgcacctgagcatcttttgcagaagctcattgcttctggggagatcaatcaagaacaagctgagttggccagacgtgttcctgtggctgatgacattgcggttgaagctgattctggtggacacactgacaaccgtccaatccatgtcattctgcctctgattatcaacctgagggataggcttcacagagagtgtggatacccagcaaacctgagggttcgtgttggtgctgggggtggcattgggtgtccccaagctgcgctggcaactttcaacatgggtgcctctttcattgtcactggaacagtgaaccaagttgccaaacaatctgggacgtgtgacaatgtgaggaaacagcttgcgaaagcaacttactcagatgtttgcatggcaccggcagctgacatgtttgaggaaggtgtgaaacttcaagttttgaagaaaggaacaatgttcccttcaagagccaacaaactctatgagttgttctgcaagtatgattcttttgagtccatgcctccagcagagcttgcgagggttgagaaaagaatcttcagtcgtgcattggaagaggtctgggatgagaccaagaacttctacatcaaccgtctccacaacccagagaagatacagagggctgagagggaccccaaactgaagatgtcactgtgtttcagatggtatctgtccctggcttcaaggtgggccaacactggagcttctgacagagtcatggactaccaagtttggtgtggtcctgccattggttcattcaatgatttcatcaaaggaacttaccttgatccggcagtggcaaatgagtacccgtgtgttgtgcagatcaacaaacagattcttagaggagcgtgcttcttgaggcgtcttgaaatactgagaaatgcaaggctttcagatggtgcagctgcacttgtggcgagcattgatgacacatatgtccctgctgagaagctgtgagtagttagcttaatcacttaggtcacccagtccaagcccggcctagcacgatgatcatgagtgttgctattgatgtatgttaatactatacacagtcatcgtgtgtgttttataaaactgtaagcttaggatgtttgaggctaatgtaattagcactacaccgtaataaatgagaggtttactttatgttttaataatgttcttacccttgctgctctctaaactgtaatggcgtacggttagctaaactaaagtaaaaatcgattcgcttgagtaaaattagtgaccgggaaagatcatcgactactactgctcagagatgtaatcggtaattaagacttcaagctcaataattaattaggagtaaatctggcttcgaatttttaaattgtcaacttccaaagaaggattggcaagactcaatctcaattgcccaacaaacatatggctctttacaaatttggaatctctttttgatggcaagaacgtcgtaattcctctgtcgatctcatgtaattaccaaactcatctacttattactttctttatatgcacttactgatgcggccgcttaattaatctgacctgaccactagacctgagtgagtacagatgtgctactagtgctagcctcgaggtcgaccaacttttctatacaaagttgtctagacctaggactaggcactgagtgactcactgacctgactgagtgactggcggccgcagcttatagtaaagatttttttgttaataaaatgaaagttaatatttatggatttatttgaacatatttacaagtttttgttaataaatttatttacagaagtgttaaatttgaaaatgtgttaaatgagagttaatatttatggatataatattactttatttaaaaataaaatgaatttatattaaaatatgatttggtaaaagatattataaagaggaacttggatgagaaagacgacgatgggcaaaagttgcatggcacaccgcttttgttcagtaacatctgcactgtggcgcctttttcacactcaccatgcatgctgccacgtcagctttcacactatgacaccactggccatacacgttgccacctcagctttctcctcttctcactatgacacgactggccatgcatgcatgcatgctgccacctcagctcccgcctcttcacccgtgtctttctctcatgtcgcagtgctgcgtgccaacctcttctctctataaatagagagaagagaatgatggttaaactcaaaccaaaacaagaaaacatacacaaatagcaaaacggatccacaaccaaaaatggcgcttcgtgtcaagaccaacaagaagccatgttgggagatgaccaaggaggaactgacctctggcaaaactgaggtgttcaactatgaggaactcctggagtttgcagagggtgacatagctaaggtttttggtccggagtttgctgtcatagacaagtaccccagaagggtgaggctgcctgctcgtgaatacctgcttgtgacaagggtcacactcatggatgccgaggtcaacaactacagagttggtgccagaatggtcactgagtatgatcttccagtgaatggcgaattgtctgagggaggtgattgtccctgggcagttctggttgagagtggacagtgcgatttgatgctgatatcatacatgggaattgatttccagaaccaaggtgacagagtttaccgtctgctcaacaccacgttgacattctatggggttgcccatgagggagagacccttgagtatgacatcagagtgaccggttttgccaaacgtttggatggtggcatctccatgttcttctttgagtatgactgctatgtcaatgggaggcttctcattgagatgagagatggctgtgctggcttcttcacaaatgaggagcttgatgcgggaaagggtgtggtgttcacaagaggggatttggctgccagagctaagattccaaagcaagatgtttctccctatgctgtcgctccctgccttcacaaaacaaaactcaacgaaaaggagatgcagaccttggttgacaaagattgggcttccgtttttggctcaaagaatggcatgccggagatcaactacaaactctgcgcacgtaagatgctcatgattgatagagtcaccagcattgaccataagggaggtgtgtacggtttgggtcagttggttggtgagaaaatcttggagagggaccattggtacttcccatgccattttgttaaggatcaagtcatggctggatctcttgtcagcgacggttgttcacaaatgctcaagatgtacatgatctggctcggtttgcaccttaccaccggaccatttgacttcagacccgtcaacggacacccgaacaaagttaggtgtaggggtcagatatctcctcataagggaaagttggtctacgtcatggagatcaaagagatgggattcgacgaggataacgatccgtacgccattgctgacgtcaacatcattgacgttgatttcgaaaagggtcaagatttcagccttgatagaatcagcgactacggaaagggggatcttaacaaaaagatcgtcgtggacttcaagggcattgctctcaagatgcagaagagatccacgaacaagaacccctccaaagttcagcccgtttttgctaacggtgcagccactgtgggaccggaagcgtccaaggccagctctggtgccagtgctagtgcttctgctgcccctgcgaagcctgctttctcagcagatgttcttgcgccaaagccagttgcacttcctgaacatatcctcaagggtgacgctctcgctccgaaagaaatgtcctggcatcccatgtcaaaacttcctggcaacccgacgccgttcttctcccctagttcttaccctccgagggcaatttgcttcatccctttccctggcaacccacttgacaacaattgcaaagctggagaaatgcctctgaactggtacaacatgtcagagttcatgtgtggaaaagttagcaactgcttgggaccagagttcgcaagatttgataagtcaaatacgagcagaagccctgcttttgatttggctcttgtgactagagttgttgaagtcacaaacatggaacatggcaagttcctgaatgttgattgcaatcccagcaaaggcacaatggtgggggagtttgactgtcctcaagatgcgtggttctttgatggttcttgcaatgatgggcacatgccttattccatcatcatggaaatcggacttcagacatccggtgttctcaccagtgtgttgaaagcaccactgacgatggacaaagatgacattctctttaggaaccttgatgcaagtgctgaaatggtgaggccagatgtggatgtgagggggaaaaccataaggaatgtgaccaagtgcactggatatgcaatgttgggaaagatggggattcacagattcacgtttgagttgtctgttgatggcgtggttttctacaaaggaagcacttcctttggatggttcactccagaggtgtttgctcagcaagctggacttgacaatgggaaaaagacggagccttggtgcaaaactaacaacacgagtgtgagaagagttgaaatcgcatcagccaaaggcaaagaacagctgactgagaaacttccagatgcaactaatgctcaagttctcagaaggtcagaacagtgtgagtatttggattacctcaacattgctcctgattctgggctgcatgggaaaggatatgcgcatggacacaaagatgttaacccacaagactggttcttctcttgtcacttttggtttgatcctgtgatgcctggatctttgggaattgagtcaatgttccagctcattgaggcatttgcggtggaccagaacataccgggagaatacaatgtgagcaatccgacctttgcccatgcccctggaaaaacggcgtggaagtaccgtggtcaattgacaccaaagaaccgtgcgatggactgtgaggtgcacatagtttcaatcacagcctctcctgaaaatggaggctacgttgacatagtggcagatggagcactttgggttgatggtctccgtgtgtatgaagccaaagaactcagagttcgtgttgtcagtgcaaaacctcaagccattccggatgttcaacaacagccacccagcgcaaaagcggaccctgggaaaactggagttgcactcagtccgactcagttgagagatgtcctgcttgaagtggacaatccattgtatcttggtgttgaaaactccaatttggtgcagtttgaatccaaacctgcaacttcttcaaggattgtcagtatcaaaccatgctccataagtgatcttggtgacaagtccttcatggaaacgtacaatgtgtcagcacctctgtacactggagcaatggccaagggaattgcgtctgcggaccttgtcattgctgctgggaagaggaagatattgggttcttttggagcgggtgggcttccaatgcaccatgtgagggcagctttggagaagatacaagcggctctgcctcaaggaccatatgctgtgaacctcattcattcaccttttgacagcaacttggaaaaggggaatgttgatctcttcctcgaaaagggcgttactgtggtggaggcttctgcattcatgaccctcactccccaagttgttcgttaccgtgcagccggactctcaaggaacgctgatgggagtgtcaacatcagaaaccgtatcattggaaaagtgtccagaacagaactcgccgaaatgttcatcagaccggctccggaacacctccttgagaaactcatagcttctggtgagataacacaagaacaagccgaacttgcccgtcgtgttcctgtcgcagacgacatcgctgttgaagctgattctggtggtcacactgacaaccgtcccatccacgtcatcttgcctttgatcatcaaccttaggaacagactgcacagagagtgtggttatcctgcgcaccttagagtcagagttggagctggaggcggtgttggctgcccacaagctgctgcggctgccctcacaatgggagctgccttcatagtgactgggactgtcaatcaagttgctaaacagtccgggacatgtgacaacgtgagaaaacaactcagtcaagccacctacagtgacatttgcatggctccagcagctgatatgtttgaggaaggtgtgaaactccaagttctcaagaagggaacaatgttcccatcaagagctaacaaattgtacgaactcttttgcaagtacgactctttcgattcaatgcctcctgctgaacttgaaaggatcgagaagaggatcttcaagagggcacttcaagaggtctgggaagagaccaaggacttttacatcaatggtttgaagaatccagagaagatacagagagcggaacatgaccccaaactcaagatgtctttgtgtttcagatggtatcttggtcttgcatcacgttgggccaacatgggtgctcctgatcgtgtcatggactatcaagtctggtgtggtccagccattggagccttcaatgacttcatcaaaggaacatatcttgatcctgctgtctctaatgagtacccatgtgttgtccagatcaaccttcagattttgcgtggtgcatgttacctgaggcgtcttaatgctctgagaaatgatccgaggattgatcttgagactgaagatgctgcctttgtctatgagccaacgaatgcgctttgagtagttagcttaatcacttaggtcacccagtccaagcccggcctagcacgatgatcatgagtgttgctattgatgtatgttaatactatacacagtcatcgtgtgtgttttataaaactgtaagcttaggatgtttgaggctaatgtaattagcactacaccgtaataaatgagaggtttactttatgttttaataatgttcttacccttgctgctctctaaactgtaatggcgtacggttagctaaactaaagtaaaaatcgattcgcttgagtaaaattagtgaccgggaaagatcatcgactactactgctcagagatgtaatcggtaattaagacttcaagctcaataattaattaggagtaaatctggcttcgaatttttaaattgtcaacttccaaagaaggattggcaagactcaatctcaattgcccaacaaacatatggctctttacaaatttggaatctctttttgatggcaagaacgtcgtaattcctctgtcgatctcatgtaattaccaaactcatctacttattactttctttatatgcacttactgatgcggccgcttaattaatcacgagtggatgactgtcacgactgactcatgactgactactagtgctagcctcgaggtcgacacaactttgtataataaagttgtctagacctaggcgagtcatgagtcgtgacatgacgtcatgctcatcagactgcggccgcagcttatagtaaagatttttttgttaataaaatgaaagttaatatttatggatttatttgaacatatttacaagtttttgttaataaatttatttacagaagtgttaaatttgaaaatgtgttaaatgagagttaatatttatggatataatattactttatttaaaaataaaatgaatttatattaaaatatgatttggtaaaagatattataaagaggaacttggatgagaaagacgacgatgggcaaaagttgcatggcacaccgcttttgttcagtaacatctgcactgtggcgcctttttcacactcaccatgcatgctgccacgtcagctttcacactatgacaccactggccatacacgttgccacctcagctttctcctcttctcactatgacacgactggccatgcatgcatgcatgctgccacctcagctcccgcctcttcacccgtgtctttctctcatgtcgcagtgctgcgtgccaacctcttctctctataaatagagagaagagaatgatggttaaactcaaaccaaaacaagaaaacatacacaaatagcaaaacggatccacaaccaaaaatgcccactccagatgccactgcgcctctcaacaagccgtcagactatgctgtgtaccacgaagaggatggtcctttctggactgctgattcctctggtgtcagcagagtgaacttctctgaaactggtgtgggatctgaaggtgtcattcctgcgctcacactgattgatgtgtttgagcgtgcggtcaaacgtggtggcaataggattgcattcagaacagagaacatgccaaccttgaggcgtggagaagaggctcctgatgctttgccgctcaaagattggaagtcctggtcttggaaacagtacaaagctgatgttcacagaattgcgagggctctgatggatttgggagttgagcagcacgatgcggtctccatctttggcttcaactcaccagaatggttcctcagtgctgtcggtgcagttcatgctggtgccaagatcgctggaatctacccttcagacactcctgctcaagtgcagtacaaagccttccactctgacactgctgttgcagttgtggagaacgaacagtgcttcaagaaattcgcagaggtggttgaggatctcccttacctcaaagccattgtttgttgggattatgaagccacagacatcacaagggaagatggttcagtggttgaagtcctgacctttgctgagttcctgaagagaggtgacactgtggaagcagctgcacttgatgagagaatcagcaagattgagcccaccatgtgtgctgccctgatctacaccagtggcacaactgggagacccaaagctgtcatgatctcccatgacaaccttgtctttgaagcatctgctgtggtcccgaacttgggaggggcatgcacgaccactgctgaggaaaggattctttcctaccttcctttgtctcatgttgctggaatgatggttgacatcattgctccaatcatagcgacagcgttccacaaaggaaggatctgtgtttgttttgccagaccgtatgatttgagaactggaacccttgggcaaagactcaatgcagtggagccaaccatattccttggtgtgccacgtgtgtgggaaaagatccaagagaaattgatggctgttggtgccaaaaccactggtctcaagaagaaactcagcacggcagccaagaaacgtgggcttgaatttcaagaggaacaacagatagggagaagtggtgccaaccctggctttggaccgcttggaatctacaagaaacttttgggcctcatcaaaggaaagttggggctgaccaaatgcaagtttgcctttgctggcgcagctccaatgacccgtgaaacccttcagtactttggagcgctgaacatcaacatcaatgaggtctatggaatgtctgaatgcagtggggctgccacctggtcaactgacaaagctcatgagtggggcactgttggctatgagatgccctcctgtgaagtcagagtgttcaagattgcggaggatggcaccaagacagagtgcccaagagctgctgacatcatgcatgccacagaagaggaacaaggtgaagtttgcttccgtggaaggaacatcatgatgggatacttggccaacccgaaacttggtgatgaccatgttgctgagattgaagagaagaatgcagctgccatagatagcgaagggtggcttcactctggtgacaagggagcaatttccacaaggggaatgctcaagataacgggcagatacaaggagcttatcataggtgctggtggggagaatgtggctcctgttcccattgaagatgccatcaaggcgaggatgccttttgtttcaaatgcaatgatggttggagacaagaggaagttcatggctgtccttctgactttgaaaacggttggagcaactggagagcttcctggcacaaacaagctcatgggagcagctgcggactatggtgagaccattgaggatgcctgtgacaatgaggcgctcattgaagagataacgcagcaactcaaagagataggtgacgatggagatgtcacgccaagcaatgcagcccgtatacaaaagttcacgattttgccactcgacttcagtgtctccacagatgaactgacagcaacgttgaaattgaagagaagtgtggttgcagacaagtatgaggacatcatagaggctttctatgagagcaagtctgtctttgtgccttactcaacagttggagcttatgcaacgggtggaccagttgatgactctgttgtggatggatcattcaaaggtgactttagcatgattggggatgacgatccggatcttcagaatgtggatgtccttgaagcaattgatgaggacaactgagtagttagcttaatcacttaggtcacccagtccaagcccggcctagcacgatgatcatgagtgttgctattgatgtatgttaatactatacacagtcatcgtgtgtgttttataaaactgtaagcttaggatgtttgaggctaatgtaattagcactacaccgtaataaatgagaggtttactttatgttttaataatgttcttacccttgctgctctctaaactgtaatggcgtacggttagctaaactaaagtaaaaatcgattcgcttgagtaaaattagtgaccgggaaagatcatcgactactactgctcagagatgtaatcggtaattaagacttcaagctcaataattaattaggagtaaatctggcttcgaatttttaaattgtcaacttccaaagaaggattggcaagactcaatctcaattgcccaacaaacatatggctctttacaaatttggaatctctttttgatggcaagaacgtcgtaattcctctgtcgatctcatgtaattaccaaactcatctacttattactttctttatatgcacttactgatgcggccgcttaattaatctgatcatggatgctacgtcacggcagtacaggactatcactagacctaggagctgtgctgggtaactcacatgagtcactggtcacatcagcggccgcagcttatagtaaagatttttttgttaataaaatgaaagttaatatttatggatttatttgaacatatttacaagtttttgttaataaatttatttacagaagtgttaaatttgaaaatgtgttaaatgagagttaatatttatggatataatattactttatttaaaaataaaatgaatttatattaaaatatgatttggtaaaagatattataaagaggaacttggatgagaaagacgacgatgggcaaaagttgcatggcacaccgcttttgttcagtaacatctgcactgtggcgcctttttcacactcaccatgcatgctgccacgtcagctttcacactatgacaccactggccatacacgttgccacctcagctttctcctcttctcactatgacacgactggccatgcatgcatgcatgctgccacctcagctcccgcctcttcacccgtgtctttctctcatgtcgcagtgctgcgtgccaacctcttctctctataaatagagagaagagaatgatggttaaactcaaaccaaaacaagaaaacatacacaaatagcaaaacggatccacaaccaaaaatgcttcagcacacttggcttccgaagcctcccaatctgaccctcttgtcagatgaggttcatctctggaggattcctcttgaccagcctgagtcacaacttcaagaccttgctgccaccctgagcagtgatgaattggcgagggcaaacagattctactttccagaacacagaaggcgtttcactgctgggagaggcatcctcagatccatcttgggtggatacttgggagtggaaccgggtcaagtcaagtttgattatgagtcccgtgggaaaccgatccttggtgacagatttgctgagagtggactcctgttcaacttgtctcacagccagaaccttgccttgtgtgctgtcaactacacgcgtcaaataggcattgatcttgaatatctgcgtccaacatctgacttggagtctcttgcaaagaggttctttctcccaagagaatatgaactcttgaggtcactccctgatgagcagaaacagaagattttctttcgttactggacttgcaaagaggcttatctcaaagcaacgggagatggaatagccaaacttgaagagatcgagatagcactcaccccaacagaacctgccaagctccaaacagctcctgcgtggtctctgttggagcttgtgccagatgacaattgtgttgcagctgtggctgttgcgggttttggttggcagcccaagttctggcattactgagtagttagcttaatcacttaggtcacccagtccaagcccggcctagcacgatgatcatgagtgttgctattgatgtatgttaatactatacacagtcatcgtgtgtgttttataaaactgtaagcttaggatgtttgaggctaatgtaattagcactacaccgtaataaatgagaggtttactttatgttttaataatgttcttacccttgctgctctctaaactgtaatggcgtacggttagctaaactaaagtaaaaatcgattcgcttgagtaaaattagtgaccgggaaagatcatcgactactactgctcagagatgtaatcggtaattaagacttcaagctcaataattaattaggagtaaatctggcttcgaatttttaaattgtcaacttccaaagaaggattggcaagactcaatctcaattgcccaacaaacatatggctctttacaaatttggaatctctttttgatggcaagaacgtcgtaattcctctgtcgatctcatgtaattaccaaactcatctacttattactttctttatatgcacttactgatgcggccgcttaattaactactgtcactgaggccgtagacgagtacggactgatctaactagtgctagcctcgaggtcgacacccagctttcttgtacaaagtggttgcggccgcttaattaaatttaaattcaattaatgcaatcttgattttcaacaacgaaggtaatggcgtaaaagaaaaaatgtatgttattgtattgatctttcatgatgttgaagcgtgccataatatgatgatgtataattaaaatattaactgtcgcattttattgaaatggcactgttatttcaaccatatctttgattctgttacatgacacgactgcaagaagtaaataatagacgccgttgttaaagaattgctatcatatgtgcctaactagagggaatttgagcgtcagacctaatcaaatattacaaaatatctcactctgtcgccagcaatggtgtaatcagcgcagacaaatggcgtaaagatcgcggaaaaacctccccgagtggcatgatagctgcctctgtattgctgatttagtcagccttatttgacttaagggtgccctcgttagtgacaaattgctttcaaggagacagccatgccccacactttgttgaaaaacaaattgcctttggggagacggtaaagccagttgctcttcaataaggaatgtcgaggaggcaatgtaaccgcctctggtagtacacttctctaatccaaaaatcaatttgtattcaagataccgcaaaaaacttatggtttaaaccctgcaggactagtccagaaggtaattatccaagatgtagcatcaagaatccaatgtttacgggaaaaactatggaagtattatgtaagctcagcaagaagcagatcaatatgcggcacatatgcaacctatgttcaaaaatgaagaatgtacagatacaagatcctatactgccagaatacgaagaagaatacgtagaaattgaaaaagaagaaccaggcgaagaaaagaatcttgaagacgtaagcactgacgacaacaatgaaaagaagaagataaggtcggtgattgtgaaagagacatagaggacacatgtaaggtggaaaatgtaagggcggaaagtaaccttatcacaaaggaatcttatcccccactacttatccttttatatttttccgtgtcatttttgcccttgagttttcctatataaggaaccaagttcggcatttgtgaaaacaagaaaaaatttggtgtaagctattttctttgaagtactgaggatacaacttcagagaaatttgtaagtttgtaggtaccagatctggatcccaaaccatgtctccggagaggagaccagttgagattaggccagctacagcagctgatatggccgcggtttgtgatatcgttaaccattacattgagacgtctacagtgaactttaggacagagccacaaacaccacaagagtggattgatgatctagagaggttgcaagatagatacccttggttggttgctgaggttgagggtgttgtggctggtattgcttacgctgggccctggaaggctaggaacgcttacgattggacagttgagagtactgtttacgtgtcacataggcatcaaaggttgggcctaggatctacattgtacacacatttgcttaagtctatggaggcgcaaggttttaagtctgtggttgctgttataggccttccaaacgatccatctgttaggttgcatgaggctttgggatacacagcccggggtacattgcgcgcagctggatacaagcatggtggatggcatgatgttggtttttggcaaagggattttgagttgccagctcctccaaggccagttaggccagttacccaaatctgagtagttagcttaatcacctagagctcgatcggcggcaatagcttcttagcgccatcccgggttgatcctatctgtgttgaaatagttgcggtgggcaaggctctctttcagaaagacaggcggccaaaggaacccaaggtgaggtgggctatggctctcagttccttgtggaagcgcttggtctaaggtgcagaggtgttagcgggatgaagcaaaagtgtccgattgtaacaagatatgttgatcctacgtaaggatattaaagtatgtattcatcactaatataatcagtgtattccaatatgtactacgatttccaatgtctttattgtcgccgtatgtaatcggcgtcacaaaataatccccggtgactttcttttaatccaggatgaaataatatgttattataatttttgcgatttggtccgttataggaattgaagtgtgcttgaggtcggtcgccaccactcccatttcataattttacatgtatttgaaaaataaaaatttatggtattcaatttaaacacgtatacttgtaaagaatgatatcttgaaagaaatatagtttaaatatttattgataaaataacaagtcaggtattatagtccaagcaaaaacataaatttattgatgcaagtttaaattcagaaatatttcaataactgattatatcagctggtacattgccgtagatgaaagactgagtgcgatattatggtgtaatacataggaattcgtttaaacgatctgcgtctaattttcggtccaacttgcacaggaaagacgtcgaccgcggtagctcttgcccagcagactgggcttccagtcctttcgctcgatcgggtccaatgttgtcctcagctgtgaaccggaagcggacgaccaacagtggaagaactgaaaggaacgagccgtctataccttgatgatcggcctctggtgaagggtatcatcgcagccaagcaagctcatgaaaggctgatgggggaggtgtataattatgaggcccacggcgggcttattctttagggaggatctatctcgttgctcaagtgcatggcgcaaagcagttattggagtgcggattttcgttggcatattattcgccacgagttagcagacgaagagaccttcatgaacgtggccaaggccagagttaagcagatgttacgccctgctgcaggcctttctattatccaatagttggttgatctttggaaagagcctcggctgaggcccatactgaaagagatcgatggatatcgatatgccatgttgtttgctagccagaaccagatcacatccgatatgctattgcagcttgacgcagatatggaggataagttgattcatgggatcgctcaggagtagctcatccatgcacgccgacaagaacagaaattccgtcgagttaacgcagccgcttacgacggattcgaaggtcatccattcggaatgtattagtttgcaccagctccgcgtcacacctgtcttcatttgaataagatgttagcaattgtttttagctttgtcttgttgtggcagggcggcaagtgcttcagacatcattctgttttcaaattttatgctggagaacagcttcttaattcctttggaaataatagactgcgtcttaaaattcagatgtctggatatagatatgattgtaaaataacctatttaagtgtcatttagaacataagttttatgaatgttcttccattttcgtcatcgaacgaataagagtaaatacaccttttttaacattacaaataagttcttatacgttgtttatacaccgggaatcatttccattattttcgcgcaaaagtcacggatattcgtgaaagcgacataaactgcgaaatttgcggggagtgtcttgagtttgcctcgaggctagcgcatgcacatagacacacacatcatctcattgatgcttggtaataattgtcattagattgtttttatgcatagatgcactcgaaatcagccaattttagacaagtatcaaacggatgtgacttcagtacattaaaaacgtccgcaatgtgttattaagttgtctaagcgtcaatttga

SEQ ID NO: 37 - DNA, 33951 bp, Artificial sequence
  Plasmid pDAB7363 T-strand
cagtcagcatcatcacaccaaaagttaggcccgaatagtttgaaattagaaagctcgcaattgaggtctacaggccaaattcgctcttagccgtacaatattactcaccggatcctaaccggtttaattaaggcgcgccatgcccgggcaagcggccgcacaagtttgtacaaaaaagcaggcttctagacctaggtggagtcatcacgcagactatctcagcatgtgcgtagcacgcggccgcagcttatagtaaagatttttttgttaataaaatgaaagttaatatttatggatttatttgaacatatttacaagtttttgttaataaatttatttacagaagtgttaaatttgaaaatgtgttaaatgagagttaatatttatggatataatattactttatttaaaaataaaatgaatttatattaaaatatgatttggtaaaagatattataaagaggaacttggatgagaaagacgacgatgggcaaaagttgcatggcacaccgcttttgttcagtaacatctgcactgtggcgcctttttcacactcaccatgcatgctgccacgtcagctttcacactatgacaccactggccatacacgttgccacctcagctttctcctcttctcactatgacacgactggccatgcatgcatgcatgctgccacctcagctcccgcctcttcacccgtgtctttctctcatgtcgcagtgctgcgtgccaacctcttctctctataaatagagagaagagaatgatggttaaactcaaaccaaaacaagaaaacatacacaaatagcaaaacggatccacaaccaaaaatggcttcctctatgctctcttccgctactatggttgcctctccggctcaggccactatggtcgctcctttcaacggacttaagtcctccgctgccttcccagccacccgcaaggctaacaacgacattacttccatcacaagcaacggcggaagagttaactgcatgcaggtgtggcctccgattggaaagaagaagtttgagactctctcttaccttcctgaccttaccgattccgaagcagcgaggctgcaagagcagaaaggaggtgagatggacacgaggattgcgatcataggcatgagcgccatacttccttgtggaaccacggtgagagagtcatgggagaccataagggctggcattgattgcctgtctgatcttcctgaggatcgtgttgatgtgactgcgtactttgacccagtcaagaccacaaaggacaaaatctactgcaagagaggaggtttcattcctgagtatgactttgatgcgcgtgagtttggtctcaacatgttccagatggaagattctgatgcgaatcagaccatctcacttctcaaggtcaaagaagcacttcaagatgctgggattgatgcacttggaaaggagaagaaaaacataggatgcgtgcttggcattggaggtggacagaagagttcacatgagttctacagcagactcaactatgtggttgtggagaaagtcttgagaaagatggggatgccagaggaagatgtcaaagtggctgtggagaagtacaaagcgaacttcccagaatggagacttgactctttccctggattccttgggaatgtcactgctggcagatgcaccaacacattcaacttggatggcatgaactgcgttgtggatgctgcatgtgcaagctccttgatagcagtcaaggttgcgattgatgaactgctctatggtgactgcgacatgatggtcactggtgcaacctgcacagacaactccattgggatgtacatggctttctcaaagacacctgtgttcagcacggacccaagtgtgagagcgtatgatgagaaaacgaaagggatgctcattggtgagggatcagccatgttggtgctcaaacgttatgcagatgcagtgagggatggtgatgagattcatgctgtgattcgtggttgtgcaagctcaagtgatggcaaagcagctggcatctacactcccacaatcagtggtcaagaggaagccttgagacgtgcatacaatcgtgcctgcgttgaccctgccactgtcactttggttgagggtcatgggactggcactccagttggagataggattgagttgactgcgttgaggaacttgtttgacaaagcgtatggtgaagggaacacagagaaagttgcagttggaagtatcaagtccagtattggtcatttgaaggctgttgctggtcttgctggaatgatcaaggtcatcatggctctcaaacacaagactttgcctggaacgatcaatgtggacaatccacccaatctctatgacaacactcccatcaatgagtcatccctctacatcaacacgatgaacagaccctggttccctccacctggtgttccgagacgtgctggaatatccagctttggctttggaggtgccaactaccatgcagtgttggaagaggctgaaccagagcacacgacagcgtacagactcaacaaacgtccacaaccggtgttgatgatggctgcaactcctgctgcgttgcagagcctttgtgaagctcagctgaaagagtttgaagctgcgatcaaggagaatgagacagtcaagaatactgcctacatcaagtgtgtcaagtttggagaacagttcaagttccctgggagcatacctgcgaccaatgcgagactgggattcttggtcaaagatgcggaggatgcgtgctccacgcttcgtgctatatgtgctcagtttgccaaagatgtgaccaaagaagcgtggaggcttccgagagaaggagtttctttccgtgccaaaggcattgccaccaatggtgctgttgctgcactcttctctggacaaggtgctcagtacacacacatgttcagtgaagttgcgatgaactggcctcagttcagacagtccattgctgcaatggacgctgcacagtccaaggttgctggaagtgacaaagactttgaaagagtctctcaagtcctgtacccaaggaaaccgtacgaacgtgagccagaacaagatcacaagaaaatctcactcacagcatacagccagccgtcaaccctggcatgtgctcttggtgcctttgagattttcaaggaagctggattcactccagactttgcagctggacacagcttgggtgagtttgctgcgctctatgcagctggttgtgttgacagagatgagttgtttgaacttgtttgcagaagggcaaggatcatgggaggcaaagatgcacctgccacacccaaaggttgcatggcagctgtcataggacccaacgcagagaacatcaaggttcaagctgccaacgtctggcttggaaactcaaactctccgtctcagactgtcattactgggtctgttgaagggattcaagctgaaagtgccagattgcagaaggaagggttcagagttgtgcctcttgcttgtgagtctgccttccattctccacagatggaaaatgccagctcagctttcaaagatgtcatatccaaggtttccttccgtacacccaaagcagaaacaaagctcttcagcaatgtttctggagagacctatccgacggatgccagagagatgctcactcaacacatgacctcatctgtgaagttcctgacccaagtgaggaacatgcaccaagctggtgcgagaatctttgttgagtttggaccgaaacaagttctcagcaaacttgtttctgaaaccctcaaagatgacccgtctgttgtcacagtgtctgtgaacccagcttctggcacggactctgacatacagttgagggatgctgcagttcagctggttgtggctggtgtcaatcttcaagggtttgacaagtgggatgctcctgatgccacgaggatgcaagccatcaagaaaaagagaaccacactcagactttcagctgccacctatgtcagtgacaagaccaagaaagtgagggatgctgccatgaacgacggaagatgtgtcacatacctcaagggtgctgcaccactcatcaaggctcctgaacctgtggttgacgaagctgccaagagggaggctgaaaggcttcagaaggagcttcaagacgctcagaggcagcttgacgacgccaaacgtgcagctgcagaagccaactccaaacttgctgctgccaaggaggaagccaagactgctgcagcttcagccaagcctgcagttgacactgctgttgtggagaaacatcgtgccatcctcaagtccatgctggctgagctggatggttatggaagtgttgatgcttcttcccttcagcaacagcaacagcaacagactgctccggcgcctgttaaagccgctgcccctgccgctcccgttgcaagtgctcctgctcccgccgtgtccaacgagttgcttgagaaagctgagacagttgtgatggaggttctcgctgccaagactggatacgaaacagacatgattgaggcggacatggagcttgagactgagttgggaattgacagcatcaagagggttgaaattctttctgaagtccaagctatgcttaacgttgaggcgaaagatgttgatgctctctctaggacgagaacagtgggtgaagttgtcaacgctatgaaggcagaaatcgctggttcttccgctccggcgccggcagctgccgcacctgcaccggctaaagcggctccagctgcagctgcaccagctgtttctaatgagctgctcgaaaaggcagaaactgttgtgatggaagtccttgctgccaaaactggctacgaaactgacatgatagaatcagacatggagcttgagacggagcttggaattgattccatcaagcgtgtggaaatcctcagtgaagtccaagccatgctcaatgtggaagctaaggatgtggatgctctctcaaggaccagaactgtcggtgaggttgtcaatgccatgaaggctgagatagctggaggctccgctcctgcgccggccgctgccgctcctggtcccgctgccgcggctccagctccagctgcagccgctccggccgtctcaaacgaactccttgaaaaagctgagaccgtcgtgatggaggtcttggcagctaaaaccggctatgagactgacatgattgagtctgacatggaattggagacagaacttgggatagacagcatcaaacgtgttgaaatcctcagtgaggtccaagctatgctgaacgtggaagcgaaggatgttgatgctctgtccagaacgaggaccgttggtgaggttgtggatgccatgaaggctgaaattgctggagggtctgcgcccgcgccagctgcagccgctcctgcacccgcagccgcggcacctgctccagctgcacctgcacctgccgtttcttcagaactcttggagaaggctgagacggttgtgatggaggttttggctgcaaagactggctatgagaccgacatgattgaatctgatatggaattggagacagagcttgggatcgattccatcaaaagagtggagatcctgagtgaagtccaagccatgctcaatgttgaagctaaggatgttgatgcactttcaagaacaaggacagtgggtgaggttgtggatgccatgaaggcggagattgctggagggagcgcgcctgcgccagctgccgcggcacctgcaccggcagccgcagctccagctccagctgcaccagcaccggccgcgcccgcgccagctgtttcatccgaactcctggaaaaggccgagacggttgtgatggaggtgctcgcagctaagactggttacgagaccgacatgattgaaagtgacatggagcttgaaaccgagttgggaatagatagcatcaaacgtgttgaaatcttgtctgaggtccaagctatgttgaacgtggaggcaaaagatgtcgatgcgctttcaagaaccagaacagtcggtgaggtcgtggacgccatgaaggctgaaattgccggaagctctgctagtgcgccagctgcagccgcacctgcacctgctgccgcggcacctgctccagctgcagccgctcctgccgtcagcaatgagttgctggagaaagccgaaacagttgtgatggaagtccttgctgcaaaaactggttacgaaacggacatgattgagtcagacatggaattggagaccgaacttggaatagattccatcaagagagtggagatcctctctgaggtgcaagccatgctcaacgttgaggctaaagatgttgatgcactcagtaggacaagaactgtgggggaagttgtcgatgcgatgaaggctgagattgctggaggctctgctcctgcgccggcagctgccgcacctgcacccgcagccgcggcaccagctgtcagcaacgaattgcttgagaaggctgaaacagttgtcatggaagtgctggctgcaaaaaccggctatgagactgacatgattgagtctgacatggaacttgagacggaattgggcattgacagcatcaagcgtgttgagatcctcagtgaagtccaagcaatgctcaatgtggaggctaaggatgtggatgccctctcaaggaccagaacagttggtgaggtcgttgatgcgatgaaggcggagatcgctggaagttccgcgcctgcgccagctgcagccgctcctgcacccgcagccgcggcaccggctccagctgcagccgcaccggccgtctcctcagaactcctggaaaaggctgagacagttgtgatggaagtccttgctgcgaaaactggctatgagaccgacatgattgaatctgacatggaactggagaccgagcttggaattgactccatcaaacgtgttgaaatcctctctgaggttcaagcgatgttgaatgtggaggccaaagatgttgatgctctttccagaacaaggacggtgggagaggtggttgatgccatgaaggctgagatagctgggggttctgctcctgcgccagctgcagccgctcctgctcccgctgccgcggcaccagctgtcagcaacgaactccttgaaaaagctgaaactgttgtgatggaggttttggctgcaaagactggatacgagactgacatgatagagtcagacatggagttggaaacagagcttgggattgatagcatcaagcgtgtggaaatcctttctgaggttcaagccatgctgaacgttgaggccaaagatgtcgatgctttgtcaaggaccagaacggttggagaagtggtcgatgccatgaaggctgagatagctggtggatcagcccctgctccggctgcagccgctcctgcaagtgccggtgctgcaccagctgtgaagattgattcagttcatggtgctgactgtgacgatttgtcactgatgcacgcaaaggtggttgacatcagaaggccagatgaactgattctggaaagaccggagaaccgtccagttcttgtcgttgacgatggctcagagttgacacttgctcttgtgagggtgttgggagcctgtgcagttgtcttgacctttgagggattgcagttggctcagagagctggtgcagctgccattcgtcatgttctggctaaggacctttcagcagaatcagctgagaaggccatcaaagaggctgagcaaagatttggagcgttgggaggcttcataagccagcaagcagaaaggtttgaaccagctgagatactgggtttcacactcatgtgtgcgaagtttgccaaagcctctctctgcactgctgtggctggaggtcgtcctgccttcatcggtgtggctaggcttgacggcagacttggattcacctctcaaggcacttctgacgcactcaagagagcacagcgtggagcgatctttggactctgcaagacaatagggttggagtggtcagaatctgatgtgttcagccgtggtgtggacattgctcaagggatgcacccagaagatgctgcagttgccatagttagggagatggcgtgtgctgacatcagaatcagagaggttgggattggagcaaaccagcaaagatgcacaatcagagctgccaagttggagactgggaaccctcagagacagatagcgaaagacgatgtgcttctggtttctggaggtgctcgtgggatcacacctctttgcatccgtgagatcacgcgtcagattgctggaggcaagtacattctgttgggtcgtagcaaagtttctgcgtctgaaccagcatggtgtgctggcatcactgatgagaaggctgtgcagaaagctgccacccaagagttgaagagggccttcagtgctggtgaaggacccaaacccactccaagggctgtcacgaaacttgtgggatctgttcttggtgctcgtgaagtgagaagctccattgctgccattgaagctctgggtggcaaagcgatctacagctcttgtgatgtgaactctgctgcagatgttgccaaagcagttagggatgcagagtcccagcttggtgccagagttagtggaatcgttcacgcttctggtgtgctccgtgatcgtctcatagagaagaaactccctgacgagtttgatgctgtctttgggaccaaagtcactgggttggagaatcttctggctgcagttgatcgtgccaacctcaaacacatggttctcttcagctcccttgctggtttccacggcaatgttggtcagtctgactatgcgatggcaaacgaagctctcaacaagatgggtttggaacttgcgaaggatgtcagtgtcaagtccatctgctttggtccctgggatggtgggatggtgacacctcaactcaagaaacagtttcaagaaatgggagttcagatcattcctcgtgaaggaggtgctgatacagttgcgaggattgtgttgggatcaagtcctgctgagatccttgttggaaactggaggacaccatccaagaaagttggaagtgacacgatcaccctgcatagaaagatcagtgccaagtccaatcccttcttggaggatcatgtcatacaaggcagaagggtgttgccaatgacccttgctattgggagccttgctgagacctgccttggactcttccctggctactctctctgggccatagatgacgcacagctcttcaaaggtgtcactgttgatggagacgtcaactgtgaagtgaccctcacaccgtccactgctccgagtgggagggtgaatgtccaagcgacgctcaagacgttctcaagtggaaaacttgttccagcctacagagctgtcatagtgttgtccaaccaaggtgctccacctgccaatgcaaccatgcagcctccgagccttgatgcagatcctgctttgcaagggtcagtctatgatggcaagactctctttcatggtcctgcgttcagaggcattgatgacgttctcagctgcaccaagagccagcttgttgccaagtgttctgctgttcctggatcagatgcagccagaggagagtttgcaactgacactgatgcacatgatccctttgtcaatgatcttgcctttcaagcaatgttggtctgggtgaggagaacgctgggacaagctgcactcccgaactccattcagaggatagtccaacacagaccggtcccacaagacaaacccttctacatcaccctcagatccaatcagagtggtggacatagccagcacaaacatgcacttcagttccacaacgaacaaggtgatctcttcattgatgttcaagcctctgtcattgcgacagactcacttgcgttctgagtagttagcttaatcacttaggtcacccagtccaagcccggcctagcacgatgatcatgagtgttgctattgatgtatgttaatactatacacagtcatcgtgtgtgttttataaaactgtaagcttaggatgtttgaggctaatgtaattagcactacaccgtaataaatgagaggtttactttatgttttaataatgttcttacccttgctgctctctaaactgtaatggcgtacggttagctaaactaaagtaaaaatcgattcgcttgagtaaaattagtgaccgggaaagatcatcgactactactgctcagagatgtaatcggtaattaagacttcaagctcaataattaattaggagtaaatctggcttcgaatttttaaattgtcaacttccaaagaaggattggcaagactcaatctcaattgcccaacaaacatatggctctttacaaatttggaatctctttttgatggcaagaacgtcgtaattcctctgtcgatctcatgtaattaccaaactcatctacttattactttctttatatgcacttactgatgcggccgcttaattaagatgagtgatactcaggactcaggactcactctgctgatcactagtgctagcctcgaggtcgacacaactttgtatacaaaagttgtctagacctaggctcagcaactcatccagtcaagttcgagtcagtgagttgggcggccgcagcttatagtaaagatttttttgttaataaaatgaaagttaatatttatggatttatttgaacatatttacaagtttttgttaataaatttatttacagaagtgttaaatttgaaaatgtgttaaatgagagttaatatttatggatataatattactttatttaaaaataaaatgaatttatattaaaatatgatttggtaaaagatattataaagaggaacttggatgagaaagacgacgatgggcaaaagttgcatggcacaccgcttttgttcagtaacatctgcactgtggcgcctttttcacactcaccatgcatgctgccacgtcagctttcacactatgacaccactggccatacacgttgccacctcagctttctcctcttctcactatgacacgactggccatgcatgcatgcatgctgccacctcagctcccgcctcttcacccgtgtctttctctcatgtcgcagtgctgcgtgccaacctcttctctctataaatagagagaagagaatgatggttaaactcaaaccaaaacaagaaaacatacacaaatagcaaaacggatccacaaccaaaaatggcttcctctatgctctcttccgctactatggttgcctctccggctcaggccactatggtcgctcctttcaacggacttaagtcctccgctgccttcccagccacccgcaaggctaacaacgacattacttccatcacaagcaacggcggaagagttaactgcatgcaggtgtggcctccgattggaaagaagaagtttgagactctctcttaccttcctgaccttaccgattccgaagctgcaaggaacgtgagtgcggctcatgagatgcatgacgagaagaggatagctgttgtgggcatggctgttcagtatgctggatgcaaaacgaaagacgagttctgggaagttctcatgaatggaaaagttgagagcaaagtgatcagcgacaaacgtcttggttcaaattaccgtgctgaacactacaaagctgaaaggagcaagtatgctgacaccttctgcaatgagacatatggaactcttgatgagaacgaaatagacaatgagcatgaactccttttgaaccttgccaaacaagccttggctgaaacatctgtcaaagattcaacaagatgtggcatagtttctggatgcctcagcttcccgatggacaacctccaaggtgaactcttgaatgtgtaccagaaccatgttgagaagaaacttggtgccagagttttcaaagatgcctctcactggtcagaaagagaacagtccaacaaaccagaggctggtgacagaagaatcttcatggaccctgcttcctttgttgctgaggaactcaatcttggcgctctccactactctgttgatgctgcctgtgccactgcgctctatgtgctcagactggcgcaagatcacttggtctctggtgcagctgatgtgatgctttgtggtgcaacatgcctgccggagccgtttttcatactctctgggttctcaaccttccaagccatgcctgttggaacgggtcagaatgtgtccatgccgctgcacaaagattctcaaggattgacccctggtgaaggaggttccatcatggtcctcaaacgtttggatgacgcaatcagagatggagatcacatctatggaacacttttgggagccaatgtcagcaacagtggcactggtctgccacttaaaccccttttgccgtcagagaaaaagtgcctcatggacacctacacacgtatcaatgtgcatccccacaagattcagtatgttgaatgccatgcaactgggactccacaaggtgatcgtgtggaaattgatgctgtgaaggcttgctttgaaggcaaagtcccacgttttggaaccacaaaagggaactttggacacacattggtggcagctgggtttgctggcatgtgcaaagtgcttctctccatgaagcacgggatcattccacccactccgggaatagatgacgaaacgaagatggaccctctggttgtctctggtgaggccattccctggccagaaacgaatggagaaccgaagcgtgctggtctctcagcgtttggatttggtgggaccaatgctcatgctgtctttgaggaacatgacccaagcaatgctgcatgcactggccatgactccatttctgctctctctgcacgttgtggtggtgagtcaaacatgagaatagcaatcactgggatggatgccacttttggtgctttgaaaggattggatgcttttgaaagggccatctacactggtgctcatggtgctataccactcccagaaaagagatggagattcctggggaaagacaaggacttccttgatctttgtggagtcaaagcaacaccgcatggctgttacattgaagatgttgaagttgatttccagaggctgaggactccaatgactcctgaagatatgctcttgcctcaacagcttctggctgtcaccacaattgatagggccatattggactctggcatgaagaaaggtggaaatgtggctgtctttgtggggttggggaccgatcttgaactctaccgtcaccgtgcaagggttgctctcaaggagagagtgaggcctgaagccagcaagaaactcaatgacatgatgcagtacatcaatgattgtgggacaagcacttcttacaccagctacataggcaacttggttgcaacaagggtcagttcacaatggggcttcacgggaccttccttcacaatcacagaaggcaacaattctgtgtacagatgtgctgaacttggcaaatacctcttggaaacgggagaggttgatggggttgtggttgcgggtgttgatctctgtgggagtgctgagaacctttacgtcaagtcaaggcgtttcaaggtgtctacatctgacaccccgagagccagctttgatgcagctgctgatggttactttgttggagagggctgtggtgcatttgtgctcaagcgtgagacaagctgcaccaaggatgacagaatctatgcttgcatggatgccatagttcctggaaatgttccatctgcatgtttgagagaggcattggatcaagccagagtcaagcctggagacatcgagatgttggagctttctgctgattcagcgaggcatttgaaggacccgtctgttctcccaaaggaactcactgctgaggaagagattggcggacttcagacgattcttcgtgacgatgacaagctcccaaggaatgttgcaactggaagtgtcaaggccactgttggtgacactggttatgcttctggtgctgccagtttgattaaggctgcgctttgcatctacaaccgttacctgcccagcaatggagatgactgggatgaacctgcacctgaagcaccctgggacagcacactctttgcgtgccagacctcaagagcttggttgaagaaccctggtgagagacgttatgcggctgtttccggagtcagtgaaaccagaagttgctacagtgtgctgctttctgaagcagagggacactacgagagagagaacagaatcagtttggatgaggaagcacccaagctcattgtgttgagagcagactcccatgaagagattcttggaagattggacaagataagggaaaggttcttgcagcccacgggtgctgcacccagagagtctgaattgaaggcgcaagcccgtaggatctttcttgaactccttggtgagacccttgcccaagatgcagcttcatctggaagtcagaagccccttgctctcagcttggtctccactccatccaagctccagagagaggtggaacttgcggcaaaaggcattccgagatgtctcaagatgagacgtgattggagttcccctgctggaagcagatatgcgcctgagcctttggccagtgacagagttgccttcatgtatggagaaggaaggagcccttactatggcatcacacaagacattcataggatttggcctgaacttcatgaggtcatcaatgagaaaacaaaccgtctctgggctgaaggtgacagatgggtcatgccaagggccagcttcaagagtgagcttgagtcacaacagcaagagtttgacagaaacatgattgaaatgttccgtcttggaatcctcacctcaattgccttcacaaacctggcgagagatgttctcaacatcacgcccaaagcagcctttggactcagtttgggagagatttccatgatctttgctttctccaagaaaaacggtttgataagcgatcagttgacaaaggatttgagagagtcagatgtctggaacaaagctctggctgttgagttcaatgcgctcagagaagcctggggcattccacagtctgtcccaaaagatgagttctggcaaggttacatagtgaggggaacgaaacaagacatagaagcagccatagcaccagactcaaagtatgtgaggttgaccatcatcaatgatgccaacactgctctcatcagtggaaagcctgatgcatgcaaagctgcgattgctcgtcttggtggcaacatccctgcgcttccagtcactcaaggcatgtgtgggcattgcccagaggtgggaccttacaccaaggacatcgcaaagatccacgccaaccttgagttccctgtggttgatggtcttgatctctggactaccataaaccagaagaggcttgtgccaagagccacgggtgccaaagatgaatgggctccttcatcctttggggagtatgctggacagctctatgagaaacaagccaacttccctcagatagttgaaaccatctacaagcagaactatgatgtgtttgttgaagttgggccaaacaatcacagaagcacagcagtgagaaccacgcttggaccacagagaaaccaccttgctggtgccatagacaagcagaacgaggatgcttggacgacaatagtcaagctcgtggcttcattgaaggctcaccttgttcctggagtgaccatcagtccgctctaccactccaagctcgttgcagaggctgaggcttgttatgctgcgctctgtaaaggtgagaaacccaagaaaaacaagtttgtgagaaagattcagttgaatggcagattcaacagcaaggcagaccccatctcctcagcagaccttgcatccttcccacctgcggaccctgcgattgaagctgccatctcttcaaggatcatgaagcctgtggctccgaaattctatgcgcgtctcaacattgatgagcaagatgagaccagagatccgatcttgaacaaggacaatgcgccttccagctccagctcttccagcagttcctcttccagcagttcatctccgtctcctgctccttcagctccagttcagaagaaagctgccccagctgcggagacaaaagctgttgccagtgctgatgcacttcgtagtgccctgcttgatcttgactccatgcttgcgctcagctctgcaagtgcttctggcaaccttgttgagactgcgccatctgatgccagtgtcattgtccctccgtgcaacattgctgatcttggcagcagagctttcatgaaaacttatggtgtttctgcgcctctgtacaccggtgcaatggccaagggaattgcctctgcggacttggtgatcgcagctggaaggcaaggaatccttgcgtcatttggtgctggaggccttccaatgcaagttgtgcgtgagtccattgaaaagattcaagctgccctgcccaatggaccatatgctgtcaacctcatccattctccttttgacagcaaccttgagaagggaaatgttgatctcttcttggaaaagggtgtcacttttgttgaggcttcagccttcatgacgttgacaccgcaagttgtcagatacagagcggctgggttgacgaggaatgcagatgggtcagtcaacataaggaacagaatcattgggaaagtctccagaactgagctggctgaaatgttcatgcgtcctgcacctgagcatcttttgcagaagctcattgcttctggggagatcaatcaagaacaagctgagttggccagacgtgttcctgtggctgatgacattgcggttgaagctgattctggtggacacactgacaaccgtccaatccatgtcattctgcctctgattatcaacctgagggataggcttcacagagagtgtggatacccagcaaacctgagggttcgtgttggtgctgggggtggcattgggtgtccccaagctgcgctggcaactttcaacatgggtgcctctttcattgtcactggaacagtgaaccaagttgccaaacaatctgggacgtgtgacaatgtgaggaaacagcttgcgaaagcaacttactcagatgtttgcatggcaccggcagctgacatgtttgaggaaggtgtgaaacttcaagttttgaagaaaggaacaatgttcccttcaagagccaacaaactctatgagttgttctgcaagtatgattcttttgagtccatgcctccagcagagcttgcgagggttgagaaaagaatcttcagtcgtgcattggaagaggtctgggatgagaccaagaacttctacatcaaccgtctccacaacccagagaagatacagagggctgagagggaccccaaactgaagatgtcactgtgtttcagatggtatctgtccctggcttcaaggtgggccaacactggagcttctgacagagtcatggactaccaagtttggtgtggtcctgccattggttcattcaatgatttcatcaaaggaacttaccttgatccggcagtggcaaatgagtacccgtgtgttgtgcagatcaacaaacagattcttagaggagcgtgcttcttgaggcgtcttgaaatactgagaaatgcaaggctttcagatggtgcagctgcacttgtggcgagcattgatgacacatatgtccctgctgagaagctgtgagtagttagcttaatcacttaggtcacccagtccaagcccggcctagcacgatgatcatgagtgttgctattgatgtatgttaatactatacacagtcatcgtgtgtgttttataaaactgtaagcttaggatgtttgaggctaatgtaattagcactacaccgtaataaatgagaggtttactttatgttttaataatgttcttacccttgctgctctctaaactgtaatggcgtacggttagctaaactaaagtaaaaatcgattcgcttgagtaaaattagtgaccgggaaagatcatcgactactactgctcagagatgtaatcggtaattaagacttcaagctcaataattaattaggagtaaatctggcttcgaatttttaaattgtcaacttccaaagaaggattggcaagactcaatctcaattgcccaacaaacatatggctctttacaaatttggaatctctttttgatggcaagaacgtcgtaattcctctgtcgatctcatgtaattaccaaactcatctacttattactttctttatatgcacttactgatgcggccgcttaattaatctgacctgaccactagacctgagtgagtacagatgtgctactagtgctagcctcgaggtcgaccaacttttctatacaaagttgtctagacctaggactaggcactgagtgactcactgacctgactgagtgactggcggccgcagcttatagtaaagatttttttgttaataaaatgaaagttaatatttatggatttatttgaacatatttacaagtttttgttaataaatttatttacagaagtgttaaatttgaaaatgtgttaaatgagagttaatatttatggatataatattactttatttaaaaataaaatgaatttatattaaaatatgatttggtaaaagatattataaagaggaacttggatgagaaagacgacgatgggcaaaagttgcatggcacaccgcttttgttcagtaacatctgcactgtggcgcctttttcacactcaccatgcatgctgccacgtcagctttcacactatgacaccactggccatacacgttgccacctcagctttctcctcttctcactatgacacgactggccatgcatgcatgcatgctgccacctcagctcccgcctcttcacccgtgtctttctctcatgtcgcagtgctgcgtgccaacctcttctctctataaatagagagaagagaatgatggttaaactcaaaccaaaacaagaaaacatacacaaatagcaaaacggatccacaaccaaaaatggcttcctctatgctctcttccgctactatggttgcctctccggctcaggccactatggtcgctcctttcaacggacttaagtcctccgctgccttcccagccacccgcaaggctaacaacgacattacttccatcacaagcaacggcggaagagttaactgcatgcaggtgtggcctccgattggaaagaagaagtttgagactctctcttaccttcctgaccttaccgattccgaagcgcttcgtgtcaagaccaacaagaagccatgttgggagatgaccaaggaggaactgacctctggcaaaactgaggtgttcaactatgaggaactcctggagtttgcagagggtgacatagctaaggtttttggtccggagtttgctgtcatagacaagtaccccagaagggtgaggctgcctgctcgtgaatacctgcttgtgacaagggtcacactcatggatgccgaggtcaacaactacagagttggtgccagaatggtcactgagtatgatcttccagtgaatggcgaattgtctgagggaggtgattgtccctgggcagttctggttgagagtggacagtgcgatttgatgctgatatcatacatgggaattgatttccagaaccaaggtgacagagtttaccgtctgctcaacaccacgttgacattctatggggttgcccatgagggagagacccttgagtatgacatcagagtgaccggttttgccaaacgtttggatggtggcatctccatgttcttctttgagtatgactgctatgtcaatgggaggcttctcattgagatgagagatggctgtgctggcttcttcacaaatgaggagcttgatgcgggaaagggtgtggtgttcacaagaggggatttggctgccagagctaagattccaaagcaagatgtttctccctatgctgtcgctccctgccttcacaaaacaaaactcaacgaaaaggagatgcagaccttggttgacaaagattgggcttccgtttttggctcaaagaatggcatgccggagatcaactacaaactctgcgcacgtaagatgctcatgattgatagagtcaccagcattgaccataagggaggtgtgtacggtttgggtcagttggttggtgagaaaatcttggagagggaccattggtacttcccatgccattttgttaaggatcaagtcatggctggatctcttgtcagcgacggttgttcacaaatgctcaagatgtacatgatctggctcggtttgcaccttaccaccggaccatttgacttcagacccgtcaacggacacccgaacaaagttaggtgtaggggtcagatatctcctcataagggaaagttggtctacgtcatggagatcaaagagatgggattcgacgaggataacgatccgtacgccattgctgacgtcaacatcattgacgttgatttcgaaaagggtcaagatttcagccttgatagaatcagcgactacggaaagggggatcttaacaaaaagatcgtcgtggacttcaagggcattgctctcaagatgcagaagagatccacgaacaagaacccctccaaagttcagcccgtttttgctaacggtgcagccactgtgggaccggaagcgtccaaggccagctctggtgccagtgctagtgcttctgctgcccctgcgaagcctgctttctcagcagatgttcttgcgccaaagccagttgcacttcctgaacatatcctcaagggtgacgctctcgctccgaaagaaatgtcctggcatcccatgtcaaaacttcctggcaacccgacgccgttcttctcccctagttcttaccctccgagggcaatttgcttcatccctttccctggcaacccacttgacaacaattgcaaagctggagaaatgcctctgaactggtacaacatgtcagagttcatgtgtggaaaagttagcaactgcttgggaccagagttcgcaagatttgataagtcaaatacgagcagaagccctgcttttgatttggctcttgtgactagagttgttgaagtcacaaacatggaacatggcaagttcctgaatgttgattgcaatcccagcaaaggcacaatggtgggggagtttgactgtcctcaagatgcgtggttctttgatggttcttgcaatgatgggcacatgccttattccatcatcatggaaatcggacttcagacatccggtgttctcaccagtgtgttgaaagcaccactgacgatggacaaagatgacattctctttaggaaccttgatgcaagtgctgaaatggtgaggccagatgtggatgtgagggggaaaaccataaggaatgtgaccaagtgcactggatatgcaatgttgggaaagatggggattcacagattcacgtttgagttgtctgttgatggcgtggttttctacaaaggaagcacttcctttggatggttcactccagaggtgtttgctcagcaagctggacttgacaatgggaaaaagacggagccttggtgcaaaactaacaacacgagtgtgagaagagttgaaatcgcatcagccaaaggcaaagaacagctgactgagaaacttccagatgcaactaatgctcaagttctcagaaggtcagaacagtgtgagtatttggattacctcaacattgctcctgattctgggctgcatgggaaaggatatgcgcatggacacaaagatgttaacccacaagactggttcttctcttgtcacttttggtttgatcctgtgatgcctggatctttgggaattgagtcaatgttccagctcattgaggcatttgcggtggaccagaacataccgggagaatacaatgtgagcaatccgacctttgcccatgcccctggaaaaacggcgtggaagtaccgtggtcaattgacaccaaagaaccgtgcgatggactgtgaggtgcacatagtttcaatcacagcctctcctgaaaatggaggctacgttgacatagtggcagatggagcactttgggttgatggtctccgtgtgtatgaagccaaagaactcagagttcgtgttgtcagtgcaaaacctcaagccattccggatgttcaacaacagccacccagcgcaaaagcggaccctgggaaaactggagttgcactcagtccgactcagttgagagatgtcctgcttgaagtggacaatccattgtatcttggtgttgaaaactccaatttggtgcagtttgaatccaaacctgcaacttcttcaaggattgtcagtatcaaaccatgctccataagtgatcttggtgacaagtccttcatggaaacgtacaatgtgtcagcacctctgtacactggagcaatggccaagggaattgcgtctgcggaccttgtcattgctgctgggaagaggaagatattgggttcttttggagcgggtgggcttccaatgcaccatgtgagggcagctttggagaagatacaagcggctctgcctcaaggaccatatgctgtgaacctcattcattcaccttttgacagcaacttggaaaaggggaatgttgatctcttcctcgaaaagggcgttactgtggtggaggcttctgcattcatgaccctcactccccaagttgttcgttaccgtgcagccggactctcaaggaacgctgatgggagtgtcaacatcagaaaccgtatcattggaaaagtgtccagaacagaactcgccgaaatgttcatcagaccggctccggaacacctccttgagaaactcatagcttctggtgagataacacaagaacaagccgaacttgcccgtcgtgttcctgtcgcagacgacatcgctgttgaagctgattctggtggtcacactgacaaccgtcccatccacgtcatcttgcctttgatcatcaaccttaggaacagactgcacagagagtgtggttatcctgcgcaccttagagtcagagttggagctggaggcggtgttggctgcccacaagctgctgcggctgccctcacaatgggagctgccttcatagtgactgggactgtcaatcaagttgctaaacagtccgggacatgtgacaacgtgagaaaacaactcagtcaagccacctacagtgacatttgcatggctccagcagctgatatgtttgaggaaggtgtgaaactccaagttctcaagaagggaacaatgttcccatcaagagctaacaaattgtacgaactcttttgcaagtacgactctttcgattcaatgcctcctgctgaacttgaaaggatcgagaagaggatcttcaagagggcacttcaagaggtctgggaagagaccaaggacttttacatcaatggtttgaagaatccagagaagatacagagagcggaacatgaccccaaactcaagatgtctttgtgtttcagatggtatcttggtcttgcatcacgttgggccaacatgggtgctcctgatcgtgtcatggactatcaagtctggtgtggtccagccattggagccttcaatgacttcatcaaaggaacatatcttgatcctgctgtctctaatgagtacccatgtgttgtccagatcaaccttcagattttgcgtggtgcatgttacctgaggcgtcttaatgctctgagaaatgatccgaggattgatcttgagactgaagatgctgcctttgtctatgagccaacgaatgcgctttgagtagttagcttaatcacttaggtcacccagtccaagcccggcctagcacgatgatcatgagtgttgctattgatgtatgttaatactatacacagtcatcgtgtgtgttttataaaactgtaagcttaggatgtttgaggctaatgtaattagcactacaccgtaataaatgagaggtttactttatgttttaataatgttcttacccttgctgctctctaaactgtaatggcgtacggttagctaaactaaagtaaaaatcgattcgcttgagtaaaattagtgaccgggaaagatcatcgactactactgctcagagatgtaatcggtaattaagacttcaagctcaataattaattaggagtaaatctggcttcgaatttttaaattgtcaacttccaaagaaggattggcaagactcaatctcaattgcccaacaaacatatggctctttacaaatttggaatctctttttgatggcaagaacgtcgtaattcctctgtcgatctcatgtaattaccaaactcatctacttattactttctttatatgcacttactgatgcggccgcttaattaatcacgagtggatgactgtcacgactgactcatgactgactactagtgctagcctcgaggtcgacacaactttgtataataaagttgtctagacctaggcgagtcatgagtcgtgacatgacgtcatgctcatcagactgcggccgcagcttatagtaaagatttttttgttaataaaatgaaagttaatatttatggatttatttgaacatatttacaagtttttgttaataaatttatttacagaagtgttaaatttgaaaatgtgttaaatgagagttaatatttatggatataatattactttatttaaaaataaaatgaatttatattaaaatatgatttggtaaaagatattataaagaggaacttggatgagaaagacgacgatgggcaaaagttgcatggcacaccgcttttgttcagtaacatctgcactgtggcgcctttttcacactcaccatgcatgctgccacgtcagctttcacactatgacaccactggccatacacgttgccacctcagctttctcctcttctcactatgacacgactggccatgcatgcatgcatgctgccacctcagctcccgcctcttcacccgtgtctttctctcatgtcgcagtgctgcgtgccaacctcttctctctataaatagagagaagagaatgatggttaaactcaaaccaaaacaagaaaacatacacaaatagcaaaacggatccacaaccaaaaatgcccactccagatgccactgcgcctctcaacaagccgtcagactatgctgtgtaccacgaagaggatggtcctttctggactgctgattcctctggtgtcagcagagtgaacttctctgaaactggtgtgggatctgaaggtgtcattcctgcgctcacactgattgatgtgtttgagcgtgcggtcaaacgtggtggcaataggattgcattcagaacagagaacatgccaaccttgaggcgtggagaagaggctcctgatgctttgccgctcaaagattggaagtcctggtcttggaaacagtacaaagctgatgttcacagaattgcgagggctctgatggatttgggagttgagcagcacgatgcggtctccatctttggcttcaactcaccagaatggttcctcagtgctgtcggtgcagttcatgctggtgccaagatcgctggaatctacccttcagacactcctgctcaagtgcagtacaaagccttccactctgacactgctgttgcagttgtggagaacgaacagtgcttcaagaaattcgcagaggtggttgaggatctcccttacctcaaagccattgtttgttgggattatgaagccacagacatcacaagggaagatggttcagtggttgaagtcctgacctttgctgagttcctgaagagaggtgacactgtggaagcagctgcacttgatgagagaatcagcaagattgagcccaccatgtgtgctgccctgatctacaccagtggcacaactgggagacccaaagctgtcatgatctcccatgacaaccttgtctttgaagcatctgctgtggtcccgaacttgggaggggcatgcacgaccactgctgaggaaaggattctttcctaccttcctttgtctcatgttgctggaatgatggttgacatcattgctccaatcatagcgacagcgttccacaaaggaaggatctgtgtttgttttgccagaccgtatgatttgagaactggaacccttgggcaaagactcaatgcagtggagccaaccatattccttggtgtgccacgtgtgtgggaaaagatccaagagaaattgatggctgttggtgccaaaaccactggtctcaagaagaaactcagcacggcagccaagaaacgtgggcttgaatttcaagaggaacaacagatagggagaagtggtgccaaccctggctttggaccgcttggaatctacaagaaacttttgggcctcatcaaaggaaagttggggctgaccaaatgcaagtttgcctttgctggcgcagctccaatgacccgtgaaacccttcagtactttggagcgctgaacatcaacatcaatgaggtctatggaatgtctgaatgcagtggggctgccacctggtcaactgacaaagctcatgagtggggcactgttggctatgagatgccctcctgtgaagtcagagtgttcaagattgcggaggatggcaccaagacagagtgcccaagagctgctgacatcatgcatgccacagaagaggaacaaggtgaagtttgcttccgtggaaggaacatcatgatgggatacttggccaacccgaaacttggtgatgaccatgttgctgagattgaagagaagaatgcagctgccatagatagcgaagggtggcttcactctggtgacaagggagcaatttccacaaggggaatgctcaagataacgggcagatacaaggagcttatcataggtgctggtggggagaatgtggctcctgttcccattgaagatgccatcaaggcgaggatgccttttgtttcaaatgcaatgatggttggagacaagaggaagttcatggctgtccttctgactttgaaaacggttggagcaactggagagcttcctggcacaaacaagctcatgggagcagctgcggactatggtgagaccattgaggatgcctgtgacaatgaggcgctcattgaagagataacgcagcaactcaaagagataggtgacgatggagatgtcacgccaagcaatgcagcccgtatacaaaagttcacgattttgccactcgacttcagtgtctccacagatgaactgacagcaacgttgaaattgaagagaagtgtggttgcagacaagtatgaggacatcatagaggctttctatgagagcaagtctgtctttgtgccttactcaacagttggagcttatgcaacgggtggaccagttgatgactctgttgtggatggatcattcaaaggtgactttagcatgattggggatgacgatccggatcttcagaatgtggatgtccttgaagcaattgatgaggacaactgagtagttagcttaatcacttaggtcacccagtccaagcccggcctagcacgatgatcatgagtgttgctattgatgtatgttaatactatacacagtcatcgtgtgtgttttataaaactgtaagcttaggatgtttgaggctaatgtaattagcactacaccgtaataaatgagaggtttactttatgttttaataatgttcttacccttgctgctctctaaactgtaatggcgtacggttagctaaactaaagtaaaaatcgattcgcttgagtaaaattagtgaccgggaaagatcatcgactactactgctcagagatgtaatcggtaattaagacttcaagctcaataattaattaggagtaaatctggcttcgaatttttaaattgtcaacttccaaagaaggattggcaagactcaatctcaattgcccaacaaacatatggctctttacaaatttggaatctctttttgatggcaagaacgtcgtaattcctctgtcgatctcatgtaattaccaaactcatctacttattactttctttatatgcacttactgatgcggccgcttaattaatctgatcatggatgctacgtcacggcagtacaggactatcactagacctaggagctgtgctgggtaactcacatgagtcactggtcacatcagcggccgcagcttatagtaaagatttttttgttaataaaatgaaagttaatatttatggatttatttgaacatatttacaagtttttgttaataaatttatttacagaagtgttaaatttgaaaatgtgttaaatgagagttaatatttatggatataatattactttatttaaaaataaaatgaatttatattaaaatatgatttggtaaaagatattataaagaggaacttggatgagaaagacgacgatgggcaaaagttgcatggcacaccgcttttgttcagtaacatctgcactgtggcgcctttttcacactcaccatgcatgctgccacgtcagctttcacactatgacaccactggccatacacgttgccacctcagctttctcctcttctcactatgacacgactggccatgcatgcatgcatgctgccacctcagctcccgcctcttcacccgtgtctttctctcatgtcgcagtgctgcgtgccaacctcttctctctataaatagagagaagagaatgatggttaaactcaaaccaaaacaagaaaacatacacaaatagcaaaacggatccacaaccaaaaatggcttcctctatgctctcttccgctactatggttgcctctccggctcaggccactatggtcgctcctttcaacggacttaagtcctccgctgccttcccagccacccgcaaggctaacaacgacattacttccatcacaagcaacggcggaagagttaactgcatgcaggtgtggcctccgattggaaagaagaagtttgagactctctcttaccttcctgaccttaccgattccgaacttcagcacacttggcttccgaagcctcccaatctgaccctcttgtcagatgaggttcatctctggaggattcctcttgaccagcctgagtcacaacttcaagaccttgctgccaccctgagcagtgatgaattggcgagggcaaacagattctactttccagaacacagaaggcgtttcactgctgggagaggcatcctcagatccatcttgggtggatacttgggagtggaaccgggtcaagtcaagtttgattatgagtcccgtgggaaaccgatccttggtgacagatttgctgagagtggactcctgttcaacttgtctcacagccagaaccttgccttgtgtgctgtcaactacacgcgtcaaataggcattgatcttgaatatctgcgtccaacatctgacttggagtctcttgcaaagaggttctttctcccaagagaatatgaactcttgaggtcactccctgatgagcagaaacagaagattttctttcgttactggacttgcaaagaggcttatctcaaagcaacgggagatggaatagccaaacttgaagagatcgagatagcactcaccccaacagaacctgccaagctccaaacagctcctgcgtggtctctgttggagcttgtgccagatgacaattgtgttgcagctgtggctgttgcgggttttggttggcagcccaagttctggcattactgagtagttagcttaatcacttaggtcacccagtccaagcccggcctagcacgatgatcatgagtgttgctattgatgtatgttaatactatacacagtcatcgtgtgtgttttataaaactgtaagcttaggatgtttgaggctaatgtaattagcactacaccgtaataaatgagaggtttactttatgttttaataatgttcttacccttgctgctctctaaactgtaatggcgtacggttagctaaactaaagtaaaaatcgattcgcttgagtaaaattagtgaccgggaaagatcatcgactactactgctcagagatgtaatcggtaattaagacttcaagctcaataattaattaggagtaaatctggcttcgaatttttaaattgtcaacttccaaagaaggattggcaagactcaatctcaattgcccaacaaacatatggctctttacaaatttggaatctctttttgatggcaagaacgtcgtaattcctctgtcgatctcatgtaattaccaaactcatctacttattactttctttatatgcacttactgatgcggccgcttaattaactactgtcactgaggccgtagacgagtacggactgatctaactagtgctagcctcgaggtcgacacccagctttcttgtacaaagtggttgcggccgcttaattaaatttaaattcaattaatgcaatcttgattttcaacaacgaaggtaatggcgtaaaagaaaaaatgtatgttattgtattgatctttcatgatgttgaagcgtgccataatatgatgatgtataattaaaatattaactgtcgcattttattgaaatggcactgttatttcaaccatatctttgattctgttacatgacacgactgcaagaagtaaataatagacgccgttgttaaagaattgctatcatatgtgcctaactagagggaatttgagcgtcagacctaatcaaatattacaaaatatctcactctgtcgccagcaatggtgtaatcagcgcagacaaatggcgtaaagatcgcggaaaaacctccccgagtggcatgatagctgcctctgtattgctgatttagtcagccttatttgacttaagggtgccctcgttagtgacaaattgctttcaaggagacagccatgccccacactttgttgaaaaacaaattgcctttggggagacggtaaagccagttgctcttcaataaggaatgtcgaggaggcaatgtaaccgcctctggtagtacacttctctaatccaaaaatcaatttgtattcaagataccgcaaaaaacttatggtttaaaccctgcaggactagtccagaaggtaattatccaagatgtagcatcaagaatccaatgtttacgggaaaaactatggaagtattatgtaagctcagcaagaagcagatcaatatgcggcacatatgcaacctatgttcaaaaatgaagaatgtacagatacaagatcctatactgccagaatacgaagaagaatacgtagaaattgaaaaagaagaaccaggcgaagaaaagaatcttgaagacgtaagcactgacgacaacaatgaaaagaagaagataaggtcggtgattgtgaaagagacatagaggacacatgtaaggtggaaaatgtaagggcggaaagtaaccttatcacaaaggaatcttatcccccactacttatccttttatatttttccgtgtcatttttgcccttgagttttcctatataaggaaccaagttcggcatttgtgaaaacaagaaaaaatttggtgtaagctattttctttgaagtactgaggatacaacttcagagaaatttgtaagtttgtaggtaccagatctggatcccaaaccatgtctccggagaggagaccagttgagattaggccagctacagcagctgatatggccgcggtttgtgatatcgttaaccattacattgagacgtctacagtgaactttaggacagagccacaaacaccacaagagtggattgatgatctagagaggttgcaagatagatacccttggttggttgctgaggttgagggtgttgtggctggtattgcttacgctgggccctggaaggctaggaacgcttacgattggacagttgagagtactgtttacgtgtcacataggcatcaaaggttgggcctaggatctacattgtacacacatttgcttaagtctatggaggcgcaaggttttaagtctgtggttgctgttataggccttccaaacgatccatctgttaggttgcatgaggctttgggatacacagcccggggtacattgcgcgcagctggatacaagcatggtggatggcatgatgttggtttttggcaaagggattttgagttgccagctcctccaaggccagttaggccagttacccaaatctgagtagttagcttaatcacctagagctcgatcggcggcaatagcttcttagcgccatcccgggttgatcctatctgtgttgaaatagttgcggtgggcaaggctctctttcagaaagacaggcggccaaaggaacccaaggtgaggtgggctatggctctcagttccttgtggaagcgcttggtctaaggtgcagaggtgttagcgggatgaagcaaaagtgtccgattgtaacaagatatgttgatcctacgtaaggatattaaagtatgtattcatcactaatataatcagtgtattccaatatgtactacgatttccaatgtctttattgtcgccgtatgtaatcggcgtcacaaaataatccccggtgactttcttttaatccaggatgaaataatatgttattataatttttgcgatttggtccgttataggaattgaagtgtgcttgaggtcggtcgccaccactcccatttcataattttacatgtatttgaaaaataaaaatttatggtattcaatttaaacacgtatacttgtaaagaatgatatcttgaaagaaatatagtttaaatatttattgataaaataacaagtcaggtattatagtccaagcaaaaacataaatttattgatgcaagtttaaattcagaaatatttcaataactgattatatcagctggtacattgccgtagatgaaagactgagtgcgatattatggtgtaatacataggaattcgtttaaacgatctgcgtctaattttcggtccaacttgcacaggaaagacgtcgaccgcggtagctcttgcccagcagactgggcttccagtcctttcgctcgatcgggtccaatgttgtcctcagctgtgaaccggaagcggacgaccaacagtggaagaactgaaaggaacgagccgtctataccttgatgatcggcctctggtgaagggtatcatcgcagccaagcaagctcatgaaaggctgatgggggaggtgtataattatgaggcccacggcgggcttattctttagggaggatctatctcgttgctcaagtgcatggcgcaaagcagttattggagtgcggattttcgttggcatattattcgccacgagttagcagacgaagagaccttcatgaacgtggccaaggccagagttaagcagatgttacgccctgctgcaggcctttctattatccaatagttggttgatctttggaaagagcctcggctgaggcccatactgaaagagatcgatggatatcgatatgccatgttgtttgctagccagaaccagatcacatccgatatgctattgcagcttgacgcagatatggaggataagttgattcatgggatcgctcaggagtagctcatccatgcacgccgacaagaacagaaattccgtcgagttaacgcagccgcttacgacggattcgaaggtcatccattcggaatgtattagtttgcaccagctccgcgtcacacctgtcttcatttgaataagatgttagcaattgtttttagctttgtcttgttgtggcagggcggcaagtgcttcagacatcattctgttttcaaattttatgctggagaacagcttcttaattcctttggaaataatagactgcgtcttaaaattcagatgtctggatatagatatgattgtaaaataacctatttaagtgtcatttagaacataagttttatgaatgttcttccattttcgtcatcgaacgaataagagtaaatacaccttttttaacattacaaataagttcttatacgttgtttatacaccgggaatcatttccattattttcgcgcaaaagtcacggatattcgtgaaagcgacataaactgcgaaatttgcggggagtgtcttgagtttgcctcgaggctagcgcatgcacatagacacacacatcatctcattgatgcttggtaataattgtcattagattgtttttatgcatagatgcactcgaaatcagccaattttagacaagtatcaaacggatgtgacttcagtacattaaaaacgtccgcaatgtgttattaagttgtctaagcgtcaatttga

SEQ ID NO: 38 - DNA, 105 bp, Artificial sequence
  Acyl-ACP Thioesterase Transit Peptide
atgcttaagctctcttgtaacgttaccaatcatcttcacacattctcattctttagcgattctagtctgttcatccctgtcaacagaaggactcttgctgtgtct

SEQ ID NO: 39 - DNA, 38811 bp, Artificial sequence
  plasmid pDAB7365
cttgtacaaagtggttgcggccgcttaattaaatttaaattcaattaatgcaatcttgattttcaacaacgaaggtaatggcgtaaaagaaaaaatgtatgttattgtattgatctttcatgatgttgaagcgtgccataatatgatgatgtataattaaaatattaactgtcgcattttattgaaatggcactgttatttcaaccatatctttgattctgttacatgacacgactgcaagaagtaaataatagacgccgttgttaaagaattgctatcatatgtgcctaactagagggaatttgagcgtcagacctaatcaaatattacaaaatatctcactctgtcgccagcaatggtgtaatcagcgcagacaaatggcgtaaagatcgcggaaaaacctccccgagtggcatgatagctgcctctgtattgctgatttagtcagccttatttgacttaagggtgccctcgttagtgacaaattgctttcaaggagacagccatgccccacactttgttgaaaaacaaattgcctttggggagacggtaaagccagttgctcttcaataaggaatgtcgaggaggcaatgtaaccgcctctggtagtacacttctctaatccaaaaatcaatttgtattcaagataccgcaaaaaacttatggtttaaaccctgcaggactagtccagaaggtaattatccaagatgtagcatcaagaatccaatgtttacgggaaaaactatggaagtattatgtaagctcagcaagaagcagatcaatatgcggcacatatgcaacctatgttcaaaaatgaagaatgtacagatacaagatcctatactgccagaatacgaagaagaatacgtagaaattgaaaaagaagaaccaggcgaagaaaagaatcttgaagacgtaagcactgacgacaacaatgaaaagaagaagataaggtcggtgattgtgaaagagacatagaggacacatgtaaggtggaaaatgtaagggcggaaagtaaccttatcacaaaggaatcttatcccccactacttatccttttatatttttccgtgtcatttttgcccttgagttttcctatataaggaaccaagttcggcatttgtgaaaacaagaaaaaatttggtgtaagctattttctttgaagtactgaggatacaacttcagagaaatttgtaagtttgtaggtaccagatctggatcccaaaccatgtctccggagaggagaccagttgagattaggccagctacagcagctgatatggccgcggtttgtgatatcgttaaccattacattgagacgtctacagtgaactttaggacagagccacaaacaccacaagagtggattgatgatctagagaggttgcaagatagatacccttggttggttgctgaggttgagggtgttgtggctggtattgcttacgctgggccctggaaggctaggaacgcttacgattggacagttgagagtactgtttacgtgtcacataggcatcaaaggttgggcctaggatctacattgtacacacatttgcttaagtctatggaggcgcaaggttttaagtctgtggttgctgttataggccttccaaacgatccatctgttaggttgcatgaggctttgggatacacagcccggggtacattgcgcgcagctggatacaagcatggtggatggcatgatgttggtttttggcaaagggattttgagttgccagctcctccaaggccagttaggccagttacccaaatctgagtagttagcttaatcacctagagctcgatcggcggcaatagcttcttagcgccatcccgggttgatcctatctgtgttgaaatagttgcggtgggcaaggctctctttcagaaagacaggcggccaaaggaacccaaggtgaggtgggctatggctctcagttccttgtggaagcgcttggtctaaggtgcagaggtgttagcgggatgaagcaaaagtgtccgattgtaacaagatatgttgatcctacgtaaggatattaaagtatgtattcatcactaatataatcagtgtattccaatatgtactacgatttccaatgtctttattgtcgccgtatgtaatcggcgtcacaaaataatccccggtgactttcttttaatccaggatgaaataatatgttattataatttttgcgatttggtccgttataggaattgaagtgtgcttgaggtcggtcgccaccactcccatttcataattttacatgtatttgaaaaataaaaatttatggtattcaatttaaacacgtatacttgtaaagaatgatatcttgaaagaaatatagtttaaatatttattgataaaataacaagtcaggtattatagtccaagcaaaaacataaatttattgatgcaagtttaaattcagaaatatttcaataactgattatatcagctggtacattgccgtagatgaaagactgagtgcgatattatggtgtaatacataggaattcgtttaaacgatctgcgtctaattttcggtccaacttgcacaggaaagacgtcgaccgcggtagctcttgcccagcagactgggcttccagtcctttcgctcgatcgggtccaatgttgtcctcagctgtgaaccggaagcggacgaccaacagtggaagaactgaaaggaacgagccgtctataccttgatgatcggcctctggtgaagggtatcatcgcagccaagcaagctcatgaaaggctgatgggggaggtgtataattatgaggcccacggcgggcttattctttagggaggatctatctcgttgctcaagtgcatggcgcaaagcagttattggagtgcggattttcgttggcatattattcgccacgagttagcagacgaagagaccttcatgaacgtggccaaggccagagttaagcagatgttacgccctgctgcaggcctttctattatccaatagttggttgatctttggaaagagcctcggctgaggcccatactgaaagagatcgatggatatcgatatgccatgttgtttgctagccagaaccagatcacatccgatatgctattgcagcttgacgcagatatggaggataagttgattcatgggatcgctcaggagtagctcatccatgcacgccgacaagaacagaaattccgtcgagttaacgcagccgcttacgacggattcgaaggtcatccattcggaatgtattagtttgcaccagctccgcgtcacacctgtcttcatttgaataagatgttagcaattgtttttagctttgtcttgttgtggcagggcggcaagtgcttcagacatcattctgttttcaaattttatgctggagaacagcttcttaattcctttggaaataatagactgcgtcttaaaattcagatgtctggatatagatatgattgtaaaataacctatttaagtgtcatttagaacataagttttatgaatgttcttccattttcgtcatcgaacgaataagagtaaatacaccttttttaacattacaaataagttcttatacgttgtttatacaccgggaatcatttccattattttcgcgcaaaagtcacggatattcgtgaaagcgacataaactgcgaaatttgcggggagtgtcttgagtttgcctcgaggctagcgcatgcacatagacacacacatcatctcattgatgcttggtaataattgtcattagattgtttttatgcatagatgcactcgaaatcagccaattttagacaagtatcaaacggatgtgacttcagtacattaaaaacgtccgcaatgtgttattaagttgtctaagcgtcaatttgatttacaattgaatatatcctgccccagccagccaacagctcgatttacaattgaatatatcctgccggccggcccacgcgtgtcgaggaattctgatctggcccccatttggacgtgaatgtagacacgtcgaaataaagatttccgaattagaataatttgtttattgctttcgcctataaatacgacggatcgtaatttgtcgttttatcaaaatgtactttcattttataataacgctgcggacatctacatttttgaattgaaaaaaaattggtaattactctttctttttctccatattgaccatcatactcattgctgatccatgtagatttcccggacatgaagccatttacaattgaatatatcctgccgccgctgccgctttgcacccggtggagcttgcatgttggtttctacgcagaactgagccggttaggcagataatttccattgagaactgagccatgtgcaccttccccccaacacggtgagcgacggggcaacggagtgatccacatgggacttttaaacatcatccgtcggatggcgttgcgagagaagcagtcgatccgtgagatcagccgacgcaccgggcaggcgcgcaacacgatcgcaaagtatttgaacgcaggtacaatcgagccgacgttcacgcggaacgaccaagcaagcttggctgccatttttggggtgaggccgttcgcggccgaggggcgcagcccctggggggatgggaggcccgcgttagcgggccgggagggttcgagaagggggggcaccccccttcggcgtgcgcggtcacgcgcacagggcgcagccctggttaaaaacaaggtttataaatattggtttaaaagcaggttaaaagacaggttagcggtggccgaaaaacgggcggaaacccttgcaaatgctggattttctgcctgtggacagcccctcaaatgtcaataggtgcgcccctcatctgtcagcactctgcccctcaagtgtcaaggatcgcgcccctcatctgtcagtagtcgcgcccctcaagtgtcaataccgcagggcacttatccccaggcttgtccacatcatctgtgggaaactcgcgtaaaatcaggcgttttcgccgatttgcgaggctggccagctccacgtcgccggccgaaatcgagcctgcccctcatctgtcaacgccgcgccgggtgagtcggcccctcaagtgtcaacgtccgcccctcatctgtcagtgagggccaagttttccgcgaggtatccacaacgccggcggccgcggtgtctcgcacacggcttcgacggcgtttctggcgcgtttgcagggccatagacggccgccagcccagcggcgagggcaaccagcccggtgagcgtcggaaagggtcgacggatcttttccgctgcataaccctgcttcggggtcattatagcgattttttcggtatatccatcctttttcgcacgatatacaggattttgccaaagggttcgtgtagactttccttggtgtatccaacggcgtcagccgggcaggataggtgaagtaggcccacccgcgagcgggtgttccttcttcactgtcccttattcgcacctggcggtgctcaacgggaatcctgctctgcgaggctggccggctaccgccggcgtaacagatgagggcaagcggatggctgatgaaaccaagccaaccaggaagggcagcccacctatcaaggtgtactgccttccagacgaacgaagagcgattgaggaaaaggcggcggcggccggcatgagcctgtcggcctacctgctggccgtcggccagggctacaaaatcacgggcgtcgtggactatgagcacgtccgcgagctggcccgcatcaatggcgacctgggccgcctgggcggcctgctgaaactctggctcaccgacgacccgcgcacggcgcggttcggtgatgccacgatcctcgccctgctggcgaagatcgaagagaagcaggacgagcttggcaaggtcatgatgggcgtggtccgcccgagggcagagccatgacttttttagccgctaaaacggccggggggtgcgcgtgattgccaagcacgtccccatgcgctccatcaagaagagcgacttcgcggagctggtattcgtgcagggcaagattcggaataccaagtacgagaaggacggccagacggtctacgggaccgacttcattgccgataaggtggattatctggacaccaaggcaccaggcgggtcaaatcaggaataagggcacattgccccggcgtgagtcggggcaatcccgcaaggagggtgaatgaatcggacgtttgaccggaaggcatacaggcaagaactgatcgacgcggggttttccgccgaggatgccgaaaccatcgcaagccgcaccgtcatgcgtgcgccccgcgaaaccttccagtccgtcggctcgatggtccagcaagctacggccaagatcgagcgcgacagcgtgcaactggctccccctgccctgcccgcgccatcggccgccgtggagcgttcgcgtcgtctcgaacaggaggcggcaggtttggcgaagtcgatgaccatcgacacgcgaggaactatgacgaccaagaagcgaaaaaccgccggcgaggacctggcaaaacaggtcagcgaggccaagcaggccgcgttgctgaaacacacgaagcagcagatcaaggaaatgcagctttccttgttcgatattgcgccgtggccggacacgatgcgagcgatgccaaacgacacggcccgctctgccctgttcaccacgcgcaacaagaaaatcccgcgcgaggcgctgcaaaacaaggtcattttccacgtcaacaaggacgtgaagatcacctacaccggcgtcgagctgcgggccgacgatgacgaactggtgtggcagcaggtgttggagtacgcgaagcgcacccctatcggcgagccgatcaccttcacgttctacgagctttgccaggacctgggctggtcgatcaatggccggtattacacgaaggccgaggaatgcctgtcgcgcctacaggcgacggcgatgggcttcacgtccgaccgcgttgggcacctggaatcggtgtcgctgctgcaccgcttccgcgtcctggaccgtggcaagaaaacgtcccgttgccaggtcctgatcgacgaggaaatcgtcgtgctgtttgctggcgaccactacacgaaattcatatgggagaagtaccgcaagctgtcgccgacggcccgacggatgttcgactatttcagctcgcaccgggagccgtacccgctcaagctggaaaccttccgcctcatgtgcggatcggattccacccgcgtgaagaagtggcgcgagcaggtcggcgaagcctgcgaagagttgcgaggcagcggcctggtggaacacgcctgggtcaatgatgacctggtgcattgcaaacgctagggccttgtggggtcagttccggctgggggttcagcagccagcgctttactggcatttcaggaacaagcgggcactgctcgacgcacttgcttcgctcagtatcgctcgggacgcacggcgcgctctacgaactgccgataaacagaggattaaaattgacaattgtgattaaggctcagattcgacggcttggagcggccgacgtgcaggatttccgcgagatccgattgtcggccctgaagaaagctccagagatgttcgggtccgtttacgagcacgaggagaaaaagcccatggaggcgttcgctgaacggttgcgagatgccgtggcattcggcgcctacatcgacggcgagatcattgggctgtcggtcttcaaacaggaggacggccccaaggacgctcacaaggcgcatctgtccggcgttttcgtggagcccgaacagcgaggccgaggggtcgccggtatgctgctgcgggcgttgccggcgggtttattgctcgtgatgatcgtccgacagattccaacgggaatctggtggatgcgcatcttcatcctcggcgcacttaatatttcgctattctggagcttgttgtttatttcggtctaccgcctgccgggcggggtcgcggcgacggtaggcgctgtgcagccgctgatggtcgtgttcatctctgccgctctgctaggtagcccgatacgattgatggcggtcctgggggctatttgcggaactgcgggcgtggcgctgttggtgttgacaccaaacgcagcgctagatcctgtcggcgtcgcagcgggcctggcgggggcggtttccatggcgttcggaaccgtgctgacccgcaagtggcaacctcccgtgcctctgctcacctttaccgcctggcaactggcggccggaggacttctgctcgttccagtagctttagtgtttgatccgccaatcccgatgcctacaggaaccaatgttctcggcctggcgtggctcggcctgatcggagcgggtttaacctacttcctttggttccgggggatctcgcgactcgaacctacagttgtttccttactgggctttctcagcccccgagcgcttagtgggaatttgtaccccttatcgaaccgggagcacaggatgacgcctaacaattcattcaagccgacaccgcttcgcggcgcggcttaattcaggagttaaacatcatgagggaagcggtgatcgccgaagtatcgactcaactatcagaggtagttggcgtcatcgagcgccatctcgaaccgacgttgctggccgtacatttgtacggctccgcagtggatggcggcctgaagccacacagtgatattgatttgctggttacggtgaccgtaaggcttgatgaaacaacgcggcgagctttgatcaacgaccttttggaaacttcggcttcccctggagagagcgagattctccgcgctgtagaagtcaccattgttgtgcacgacgacatcattccgtggcgttatccagctaagcgcgaactgcaatttggagaatggcagcgcaatgacattcttgcaggtatcttcgagccagccacgatcgacattgatctggctatcttgctgacaaaagcaagagaacatagcgttgccttggtaggtccagcggcggaggaactctttgatccggttcctgaacaggatctatttgaggcgctaaatgaaaccttaacgctatggaactcgccgcccgactgggctggcgatgagcgaaatgtagtgcttacgttgtcccgcatttggtacagcgcagtaaccggcaaaatcgcgccgaaggatgtcgctgccgactgggcaatggagcgcctgccggcccagtatcagcccgtcatacttgaagctaggcaggcttatcttggacaagaagatcgcttggcctcgcgcgcagatcagttggaagaatttgttcactacgtgaaaggcgagatcaccaaggtagtcggcaaataatgtctaacaattcgttcaagccgacgccgcttcgcggcgcggcttaactcaagcgttagagagctggggaagactatgcgcgatctgttgaaggtggttctaagcctcgtcttgcgatggcatttcgatccattcccattccgcgctcaagatggcttcccctcggcagttcatcagggctaaatcaatctagccgacttgtccggtgaaatgggctgcactccaacagaaacaatcaaacaaacatacacagcgacttattcacacgagctcaaattacaacggtatatatcctgccagtcagcatcatcacaccaaaagttaggcccgaatagtttgaaattagaaagctcgcaattgaggtctacaggccaaattcgctcttagccgtacaatattactcaccggatcctaaccggtttaattaaggcgcgccatgcccgggcaagcggccgcacaagtttgtacaaaaaagcaggcttctagacctagctaggtggagtcatcacgcagactatctcagcatgtgcgtagcacgcggccgcagcttatagtaaagatttttttgttaataaaatgaaagttaatatttatggatttatttgaacatatttacaagtttttgttaataaatttatttacagaagtgttaaatttgaaaatgtgttaaatgagagttaatatttatggatataatattactttatttaaaaataaaatgaatttatattaaaatatgatttggtaaaagatattataaagaggaacttggatgagaaagacgacgatgggcaaaagttgcatggcacaccgcttttgttcagtaacatctgcactgtggcgcctttttcacactcaccatgcatgctgccacgtcagctttcacactatgacaccactggccatacacgttgccacctcagctttctcctcttctcactatgacacgactggccatgcatgcatgcatgctgccacctcagctcccgcctcttcacccgtgtctttctctcatgtcgcagtgctgcgtgccaacctcttctctctataaatagagagaagagaatgatggttaaactcaaaccaaaacaagaaaacatacacaaatagcaaaacggatccacaaccaaaaatggcggcccgtctgcaggagcaaaagggaggcgagatggatacccgcattgccatcatcggcatgtcggccatcctcccctgcggcacgaccgtgcgcgagtcgtgggagaccatccgcgccggcatcgactgcctgtcggatctccccgaggaccgcgtcgacgtgacggcgtactttgaccccgtcaagaccaccaaggacaagatctactgcaagcgcggtggcttcattcccgagtacgactttgacgcccgcgagttcggactcaacatgttccagatggaggactcggacgcaaaccagaccatctcgcttctcaaggtcaaggaggccctccaggacgccggcatcgacgccctcggcaaggaaaagaagaacatcggctgcgtgctcggcattggcggcggccaaaagtccagccacgagttctactcgcgccttaattatgttgtcgtggagaaggtcctccgcaagatgggcatgcccgaggaggacgtcaaggtcgccgtcgaaaagtacaaggccaacttccccgagtggcgcctcgactccttccctggcttcctcggcaacgtcaccgccggtcgctgcaccaacaccttcaacctcgacggcatgaactgcgttgtcgacgccgcatgcgcctcgtccctcatcgccgtcaaggtcgccatcgacgagctgctctacggtgactgcgacatgatggtcaccggtgccacctgcacggataactccatcggcatgtacatggccttctccaagacccccgtgttctccacggaccccagcgtgcgcgcctacgacgaaaagacaaagggcatgctcatcggcgagggctccgccatgctcgtcctcaagcgctacgccgacgccgtccgcgacggcgatgagatccacgctgttattcgcggctgcgcctcctccagtgatggcaaggccgccggcatctacacgcccaccatttcgggccaggaggaggccctccgccgcgcctacaaccgcgcctgtgtcgacccggccaccgtcactctcgtcgagggtcacggcaccggtactcccgttggcgaccgcatcgagctcaccgccttgcgcaacctctttgacaaggcctacggcgagggcaacaccgaaaaggtcgctgtgggcagcatcaagtccagcatcggccatctcaaggccgtcgccggtctcgccggtatgatcaaggtcatcatggcgctcaagcacaagactctcccgggcaccatcaacgtcgacaacccacccaacctctacgacaacacgcccatcaacgagtcctcgctctacattaacaccatgaaccgcccctggttcccgccccctggtgtgccccgccgcgccggcatttcgagctttggctttggtggcgccaactaccacgccgtcctcgaggaggccgagcccgagcacacgaccgcgtaccgcctcaacaagcgcccgcagcccgtgctcatgatggccgccacgcccgcggccctccagtcgctctgcgaggcccagctcaaggagttcgaggccgccatcaaggagaacgagaccgtcaagaacaccgcctacatcaagtgcgtcaagttcggcgagcagttcaaattccctggctccatcccggccacaaacgcgcgcctcggcttcctcgtcaaggatgctgaggatgcctgctccaccctccgtgccatctgcgcccaattcgccaaggatgtcaccaaggaggcctggcgcctcccccgcgagggcgtcagcttccgcgccaagggcatcgccaccaacggcgctgtcgccgcgctcttctccggccagggcgcgcagtacacgcacatgtttagcgaggtggccatgaactggccccagttccgccagagcattgccgccatggacgccgcccagtccaaggtcgctggaagcgacaaggactttgagcgcgtctcccaggtcctctacccgcgcaagccgtacgagcgtgagcccgagcaggaccacaagaagatctccctcaccgcctactcgcagccctcgaccctggcctgcgctctcggtgcctttgagatcttcaaggaggccggcttcaccccggactttgccgccggccattcgctcggtgagttcgccgccctctacgccgcgggctgcgtcgaccgcgacgagctctttgagcttgtctgccgccgcgcccgcatcatgggcggcaaggacgcaccggccacccccaagggctgcatggccgccgtcattggccccaacgccgagaacatcaaggtccaggccgccaacgtctggctcggcaactccaactcgccttcgcagaccgtcatcaccggctccgtcgaaggtatccaggccgagagcgcccgcctccagaaggagggcttccgcgtcgtgcctcttgcctgcgagagcgccttccactcgccccagatggagaacgcctcgtcggccttcaaggacgtcatctccaaggtctccttccgcacccccaaggccgagaccaagctcttcagcaacgtctctggcgagacctaccccacggacgcccgcgagatgcttacgcagcacatgaccagcagcgtcaagttcctcacccaggtccgcaacatgcaccaggccggtgcgcgcatctttgtcgagttcggacccaagcaggtgctctccaagcttgtctccgagaccctcaaggatgacccctcggttgtcaccgtctctgtcaacccggcctcgggcacggattcggacatccagctccgcgacgcggccgtccagctcgttgtcgctggcgtcaaccttcagggctttgacaagtgggacgcccccgatgccacccgcatgcaggccatcaagaagaagcgcactaccctccgcctttcggccgccacctacgtctcggacaagaccaagaaggtccgcgacgccgccatgaacgatggccgctgcgtcacctacctcaagggcgccgcaccgctcatcaaggccccggagcccgttgtcgacgaggccgccaagcgcgaggccgagcgtctccagaaggagcttcaggatgcccagcgccagctcgacgacgccaagcgcgccgccgccgaggccaactccaagctcgccgctgccaaggaggaggccaagaccgccgctgcttcggccaagcccgcagttgacactgctgttgtcgaaaagcatcgtgccatcctcaagtccatgctcgcggagctcgatggctacggatcggtcgacgcttcttccctccagcagcagcagcagcagcagacggcccccgccccggtcaaggctgctgcgcctgccgcccccgttgcctcggcccctgccccggctgtctcgaacgagcttcttgagaaggccgagactgtcgtcatggaggtcctcgccgccaagaccggctacgagaccgacatgatcgaggctgacatggagctcgagaccgagctcggcattgactccatcaagcgtgtcgagatcctctccgaggtccaggccatgctcaatgtcgaggccaaggatgtcgatgccctcagccgcactcgcactgttggtgaggttgtcaacgccatgaaggccgagatcgctggcagctctgccccggcgcctgctgccgctgctccggctccggccaaggctgcccctgccgccgctgcgcctgctgtctcgaacgagcttctcgagaaggccgagaccgtcgtcatggaggtcctcgccgccaagactggctacgagactgacatgatcgagtccgacatggagctcgagactgagctcggcattgactccatcaagcgtgtcgagatcctctccgaggttcaggccatgctcaacgtcgaggccaaggacgtcgacgctctcagccgcactcgcactgtgggtgaggtcgtcaacgccatgaaggctgagatcgctggtggctctgccccggcgcctgccgccgctgccccaggtccggctgctgccgcccctgcgcctgccgccgccgcccctgctgtctcgaacgagcttcttgagaaggccgagaccgtcgtcatggaggtcctcgccgccaagactggctacgagactgacatgatcgagtccgacatggagctcgagaccgagctcggcattgactccatcaagcgtgtcgagattctctccgaggtccaggccatgctcaacgtcgaggccaaggacgtcgacgctctcagccgcacccgcactgttggcgaggtcgtcgatgccatgaaggccgagatcgctggtggctctgccccggcgcctgccgccgctgctcctgctccggctgctgccgcccctgcgcctgccgcccctgcgcctgctgtctcgagcgagcttctcgagaaggccgagactgtcgtcatggaggtcctcgccgccaagactggctacgagactgacatgatcgagtccgacatggagctcgagaccgagctcggcattgactccatcaagcgtgtcgagattctctccgaggtccaggccatgctcaacgtcgaggccaaggacgtcgacgctctcagccgcacccgcactgttggcgaggtcgtcgatgccatgaaggccgagatcgctggtggctctgccccggcgcctgccgccgctgctcctgctccggctgctgccgcccctgcgcctgccgcccctgcgcctgccgcccctgcgcctgctgtctcgagcgagcttctcgagaaggccgagactgtcgtcatggaggtcctcgccgccaagactggctacgagactgacatgattgagtccgacatggagctcgagaccgagctcggcattgactccatcaagcgtgtcgagattctctccgaggttcaggccatgctcaacgtcgaggccaaggacgtcgacgctctcagccgcactcgcactgttggtgaggtcgtcgatgccatgaaggctgagatcgctggcagctccgcctcggcgcctgccgccgctgctcctgctccggctgctgccgctcctgcgcccgctgccgccgcccctgctgtctcgaacgagcttctcgagaaagccgagactgtcgtcatggaggtcctcgccgccaagactggctacgagactgacatgatcgagtccgacatggagctcgagactgagctcggcattgactccatcaagcgtgtcgagatcctctccgaggttcaggccatgctcaacgtcgaggccaaggacgtcgatgccctcagccgcacccgcactgttggcgaggttgtcgatgccatgaaggccgagatcgctggtggctctgccccggcgcctgccgccgctgcccctgctccggctgccgccgcccctgctgtctcgaacgagcttctcgagaaggccgagactgtcgtcatggaggtcctcgccgccaagactggctacgagaccgacatgatcgagtccgacatggagctcgagaccgagctcggcattgactccatcaagcgtgtcgagattctctccgaggttcaggccatgctcaacgtcgaggccaaggacgtcgatgctctcagccgcactcgcactgttggcgaggtcgtcgatgccatgaaggctgagatcgccggcagctccgccccggcgcctgccgccgctgctcctgctccggctgctgccgctcctgcgcccgctgccgctgcccctgctgtctcgagcgagcttctcgagaaggccgagaccgtcgtcatggaggtcctcgccgccaagactggctacgagactgacatgattgagtccgacatggagctcgagactgagctcggcattgactccatcaagcgtgtcgagatcctctccgaggttcaggccatgctcaacgtcgaggccaaggacgtcgatgccctcagccgcacccgcactgttggcgaggttgtcgatgccatgaaggccgagatcgctggtggctctgccccggcgcctgccgccgctgcccctgctccggctgccgccgcccctgctgtctcgaacgagcttcttgagaaggccgagaccgtcgtcatggaggtcctcgccgccaagactggctacgagaccgacatgatcgagtccgacatggagctcgagaccgagctcggcattgactccatcaagcgtgtcgagattctctccgaggttcaggccatgctcaacgtcgaggccaaggacgtcgacgctctcagccgcactcgcactgttggcgaggtcgtcgatgccatgaaggctgagatcgctggtggctctgccccggcgcctgccgccgctgctcctgcctcggctggcgccgcgcctgcggtcaagattgactcggtccacggcgctgactgtgatgatctttccctgatgcacgccaaggtggttgacatccgccgcccggacgagctcatcctggagcgccccgagaaccgccccgttctcgttgtcgatgacggcagcgagctcaccctcgccctggtccgcgtcctcggcgcctgcgccgttgtcctgacctttgagggtctccagctcgctcagcgcgctggtgccgctgccatccgccacgtgctcgccaaggatctttccgcggagagcgccgagaaggccatcaaggaggccgagcagcgctttggcgctctcggcggcttcatctcgcagcaggcggagcgcttcgagcccgccgaaatcctcggcttcacgctcatgtgcgccaagttcgccaaggcttccctctgcacggctgtggctggcggccgcccggcctttatcggtgtggcgcgccttgacggccgcctcggattcacttcgcagggcacttctgacgcgctcaagcgtgcccagcgtggtgccatctttggcctctgcaagaccatcggcctcgagtggtccgagtctgacgtcttttcccgcggcgtggacattgctcagggcatgcaccccgaggatgccgccgtggcgattgtgcgcgagatggcgtgcgctgacattcgcattcgcgaggtcggcattggcgcaaaccagcagcgctgcacgatccgtgccgccaagctcgagaccggcaacccgcagcgccagatcgccaaggacgacgtgctgctcgtttctggcggcgctcgcggcatcacgcctctttgcatccgggagatcacgcgccagatcgcgggcggcaagtacattctgcttggccgcagcaaggtctctgcgagcgaaccggcatggtgcgctggcatcactgacgagaaggctgtgcaaaaggctgctacccaggagctcaagcgcgcctttagcgctggcgagggccccaagcccacgccccgcgctgtcactaagcttgtgggctctgttcttggcgctcgcgaggtgcgcagctctattgctgcgattgaagcgctcggcggcaaggccatctactcgtcgtgcgacgtgaactctgccgccgacgtggccaaggccgtgcgcgatgccgagtcccagctcggtgcccgcgtctcgggcatcgttcatgcctcgggcgtgctccgcgaccgtctcatcgagaagaagctccccgacgagttcgacgccgtctttggcaccaaggtcaccggtctcgagaacctcctcgccgccgtcgaccgcgccaacctcaagcacatggtcctcttcagctcgctcgccggcttccacggcaacgtcggccagtctgactacgccatggccaacgaggcccttaacaagatgggcctcgagctcgccaaggacgtctcggtcaagtcgatctgcttcggtccctgggacggtggcatggtgacgccgcagctcaagaagcagttccaggagatgggcgtgcagatcatcccccgcgagggcggcgctgataccgtggcgcgcatcgtgctcggctcctcgccggctgagatccttgtcggcaactggcgcaccccgtccaagaaggtcggctcggacaccatcaccctgcaccgcaagatttccgccaagtccaaccccttcctcgaggaccacgtcatccagggccgccgcgtgctgcccatgacgctggccattggctcgctcgcggagacctgcctcggcctcttccccggctactcgctctgggccattgacgacgcccagctcttcaagggtgtcactgtcgacggcgacgtcaactgcgaggtgaccctcaccccgtcgacggcgccctcgggccgcgtcaacgtccaggccacgctcaagaccttttccagcggcaagctggtcccggcctaccgcgccgtcatcgtgctctccaaccagggcgcgcccccggccaacgccaccatgcagccgccctcgctcgatgccgatccggcgctccagggctccgtctacgacggcaagaccctcttccacggcccggccttccgcggcatcgatgacgtgctctcgtgcaccaagagccagcttgtggccaagtgcagcgctgtccccggctccgacgccgctcgcggcgagtttgccacggacactgacgcccatgaccccttcgtgaacgacctggcctttcaggccatgctcgtctgggtgcgccgcacgctcggccaggctgcgctccccaactcgatccagcgcatcgtccagcaccgcccggtcccgcaggacaagcccttctacattaccctccgctccaaccagtcgggcggtcactcccagcacaagcacgcccttcagttccacaacgagcagggcgatctcttcattgatgtccaggcttcggtcatcgccacggacagccttgccttctaaatctaaactaggccatggtgacttaaggtagttagcttaatcacttaggtcacccagtccaagcccggcctagcacgatgatcatgagtgttgctattgatgtatgttaatactatacacagtcatcgtgtgtgttttataaaactgtaagcttaggatgtttgaggctaatgtaattagcactacaccgtaataaatgagaggtttactttatgttttaataatgttcttacccttgctgctctctaaactgtaatggcgtacggttagctaaactaaagtaaaaatcgattcgcttgagtaaaattagtgaccgggaaagatcatcgactactactgctcagagatgtaatcggtaattaagacttcaagctcaataattaattaggagtaaatctggcttcgaatttttaaattgtcaacttccaaagaaggattggcaagactcaatctcaattgcccaacaaacatatggctctttacaaatttggaatctctttttgatggcaagaacgtcgtaattcctctgtcgatctcatgtaattaccaaactcatctacttattactttctttatatgcacttactgatgcggccgcttaattaagatgagtgatactcaggactcaggactcactctgctgatcactagtgctagcctcgaggtcgacacaactttgtatacaaaagttgtctagacctagctaggctcagcaactcatccagtcaagttcgagtcagtgagttgggcggccgcagcttatagtaaagatttttttgttaataaaatgaaagttaatatttatggatttatttgaacatatttacaagtttttgttaataaatttatttacagaagtgttaaatttgaaaatgtgttaaatgagagttaatatttatggatataatattactttatttaaaaataaaatgaatttatattaaaatatgatttggtaaaagatattataaagaggaacttggatgagaaagacgacgatgggcaaaagttgcatggcacaccgcttttgttcagtaacatctgcactgtggcgcctttttcacactcaccatgcatgctgccacgtcagctttcacactatgacaccactggccatacacgttgccacctcagctttctcctcttctcactatgacacgactggccatgcatgcatgcatgctgccacctcagctcccgcctcttcacccgtgtctttctctcatgtcgcagtgctgcgtgccaacctcttctctctataaatagagagaagagaatgatggttaaactcaaaccaaaacaagaaaacatacacaaatagcaaaacggatccacaaccaaaaatggccgctcgcaacgtgtctgcagcgcatgagatgcacgatgaaaagcgcatcgccgtcgtcggcatggccgtccagtacgccggatgcaaaaccaaggacgagttctgggaggtgctcatgaacggcaaggtcgagtccaaggtgatcagcgacaaacgactcggctccaactaccgcgccgagcactacaaagcagagcgcagcaagtatgccgacaccttttgcaacgaaacgtacggcacccttgacgagaacgagatcgacaacgagcacgaactcctcctcaacctcgccaagcaggcactcgcagagacatccgtcaaagactcgacacgctgcggcatcgtcagcggctgcctctcgttccccatggacaacctccagggtgaactcctcaacgtgtaccaaaaccatgtcgagaaaaagctcggggcccgcgtcttcaaggacgcctcccattggtccgaacgcgagcagtccaacaaacccgaggccggtgaccgccgcatcttcatggacccggcctccttcgtcgccgaagaactcaacctcggcgcccttcactactccgtcgacgcagcatgcgccacggcgctctacgtgctccgcctcgcgcaggatcatctcgtctccggcgccgccgacgtcatgctctgcggtgccacctgcctgccggagccctttttcatcctttcgggcttttccaccttccaggccatgcccgtcggcacgggccagaacgtgtccatgccgctgcacaaggacagccagggcctcaccccgggtgagggcggctccatcatggtcctcaagcgtctcgatgatgccatccgcgacggcgaccacatctacggcacccttctcggcgccaatgtcagcaactccggcacaggtctgcccctcaagccccttctccccagcgagaaaaagtgcctcatggacacctacacgcgcattaacgtgcacccgcacaagattcagtacgtcgagtgccacgccaccggcacgccccagggtgatcgtgtggaaatcgacgccgtcaaggcctgctttgaaggcaaggtcccccgtttcggtaccacaaagggcaactttggacacaccctcgtcgcagccggctttgccggtatgtgcaaggtcctcctctccatgaagcatggcatcatcccgcccaccccgggtatcgatgacgagaccaagatggaccctctcgtcgtctccggtgaggccatcccatggccagagaccaacggcgagcccaagcgcgccggtctctcggcctttggctttggtggcaccaacgcccatgccgtctttgaggagcatgacccctccaacgccgcctgcacgggccacgactccatttctgcgctctcggcccgctgcggcggtgaaagcaacatgcgcatcgccatcactggtatggacgccacctttggcgctctcaagggactcgacgccttcgagcgcgccatttacaccggcgctcacggtgccatcccactcccagaaaagcgctggcgctttctcggcaaggacaaggactttcttgacctctgcggcgtcaaggccaccccgcacggctgctacattgaagatgttgaggtcgacttccagcgcctccgcacgcccatgacccctgaagacatgctcctccctcagcagcttctggccgtcaccaccattgaccgcgccatcctcgactcgggaatgaaaaagggtggcaatgtcgccgtctttgtcggcctcggcaccgacctcgagctctaccgtcaccgtgctcgcgtcgctctcaaggagcgcgtccgccctgaagcctccaagaagctcaatgacatgatgcagtacattaacgactgcggcacatccacatcgtacacctcgtacattggcaacctcgtcgccacgcgcgtctcgtcgcagtggggcttcacgggcccctcctttacgatcaccgagggcaacaactccgtctaccgctgcgccgagctcggcaagtacctcctcgagaccggcgaggtcgatggcgtcgtcgttgcgggtgtcgatctctgcggcagtgccgaaaacctttacgtcaagtctcgccgcttcaaggtgtccacctccgataccccgcgcgccagctttgacgccgccgccgatggctactttgtcggcgagggctgcggtgcctttgtgctcaagcgtgagactagctgcaccaaggacgaccgtatctacgcttgcatggatgccatcgtccctggcaacgtccctagcgcctgcttgcgcgaggccctcgaccaggcgcgcgtcaagccgggcgatatcgagatgctcgagctcagcgccgactccgcccgccacctcaaggacccgtccgtcctgcccaaggagctcactgccgaggaggaaatcggcggccttcagacgatccttcgtgacgatgacaagctcccgcgcaacgtcgcaacgggcagtgtcaaggccaccgtcggtgacaccggttatgcctctggtgctgccagcctcatcaaggctgcgctttgcatctacaaccgctacctgcccagcaacggcgacgactgggatgaacccgcccctgaggcgccctgggacagcaccctctttgcgtgccagacctcgcgcgcttggctcaagaaccctggcgagcgtcgctatgcggccgtctcgggcgtctccgagacgcgctcgtgctattccgtgctcctctccgaagccgagggccactacgagcgcgagaaccgcatctcgctcgacgaggaggcgcccaagctcattgtgcttcgcgccgactcccacgaggagatccttggtcgcctcgacaagatccgcgagcgcttcttgcagcccacgggcgccgccccgcgcgagtccgagctcaaggcgcaggcccgccgcatcttcctcgagctcctcggcgagacccttgcccaggatgccgcttcttcaggctcgcaaaagcccctcgctctcagcctcgtctccacgccctccaagctccagcgcgaggtcgagctcgcggccaagggtatcccgcgctgcctcaagatgcgccgcgattggagctcccctgctggcagccgctacgcgcctgagccgctcgccagcgaccgcgtcgccttcatgtacggcgaaggtcgcagcccttactacggcatcacccaagacattcaccgcatttggcccgaactccacgaggtcatcaacgaaaagacgaaccgtctctgggccgaaggcgaccgctgggtcatgccgcgcgccagcttcaagtcggagctcgagagccagcagcaagagtttgatcgcaacatgattgaaatgttccgtcttggaatcctcacctcaattgccttcaccaatctggcgcgcgacgttctcaacatcacgcccaaggccgcctttggcctcagtcttggcgagatttccatgatttttgccttttccaagaagaacggtctcatctccgaccagctcaccaaggatcttcgcgagtccgacgtgtggaacaaggctctggccgttgaatttaatgcgctgcgcgaggcctggggcattccacagagtgtccccaaggacgagttctggcaaggctacattgtgcgcggcaccaagcaggatatcgaggcggccatcgccccggacagcaagtacgtgcgcctcaccatcatcaatgatgccaacaccgccctcattagcggcaagcccgacgcctgcaaggctgcgatcgcgcgtctcggtggcaacattcctgcgcttcccgtgacccagggcatgtgcggccactgccccgaggtgggaccttataccaaggatatcgccaagatccatgccaaccttgagttccccgttgtcgacggccttgacctctggaccacaatcaaccagaagcgcctcgtgccacgcgccacgggcgccaaggacgaatgggccccttcttcctttggcgagtacgccggccagctctacgagaagcaggctaacttcccccaaatcgtcgagaccatttacaagcaaaactacgacgtctttgtcgaggttgggcccaacaaccaccgtagcaccgcagtgcgcaccacgcttggtccccagcgcaaccaccttgctggcgccatcgacaagcagaacgaggatgcttggacgaccatcgtcaagcttgtggcttcgctcaaggcccaccttgttcctggcgtcacgatctcgccgctgtaccactccaagcttgtggcggaggctgaggcttgctacgctgcgctctgcaagggtgaaaagcccaagaagaacaagtttgtgcgcaagattcagctcaacggtcgcttcaacagcaaggcggaccccatctcctcggccgatcttgccagctttccgcctgcggaccctgccattgaagccgccatctcgagccgcatcatgaagccggttgctccgaagttctacgcgcgtctcaacattgacgagcaggacgagacccgtgatccgatcctcaacaaggacaacgcgccgtcttccagctctagctcctcttccagctcttccagctcttccagcccgtcgccagctccgtccgccccagtgcaaaagaaggctgctccggccgcggagaccaaggctgttgcttcggctgacgcacttcgcagtgccctgctcgatctcgacagtatgcttgcgctgagctctgccagtgcctccggcaaccttgttgagactgcgcctagcgacgcctcggtcattgtgccgccctgcaacattgcggatctcggcagccgcgccttcatgaaaacgtacggtgtttcggcgcctctgtacacgggcgccatggccaagggcattgcctctgcggacctcgtcattgccgccggccgccagggcatccttgcgtcctttggcgccggcggacttcccatgcaggttgtgcgtgagtccatcgaaaagattcaggccgccctgcccaatggcccgtacgctgtcaaccttatccattctccctttgacagcaacctcgaaaagggcaatgtcgatctcttcctcgagaagggtgtcacctttgtcgaggcctcggcctttatgacgctcaccccgcaggtcgtgcggtaccgcgcggctggcctcacgcgcaacgccgacggctcggtcaacatccgcaaccgtatcattggcaaggtctcgcgcaccgagctcgccgagatgttcatgcgtcctgcgcccgagcaccttcttcagaagctcattgcttccggcgagatcaaccaggagcaggccgagctcgcccgccgtgttcccgtcgctgacgacatcgcggtcgaagctgactcgggtggccacaccgacaaccgccccatccacgtcattctgcccctcatcatcaaccttcgcgaccgccttcaccgcgagtgcggctacccggccaaccttcgcgtccgtgtgggcgccggcggtggcattgggtgcccccaggcggcgctggccaccttcaacatgggtgcctcctttattgtcaccggcaccgtgaaccaggtcgccaagcagtcgggcacgtgcgacaatgtgcgcaagcagctcgcgaaggccacttactcggacgtatgcatggccccggctgccgacatgttcgaggaaggcgtcaagcttcaggtcctcaagaagggaaccatgtttccctcgcgcgccaacaagctctacgagctcttttgcaagtacgactcgttcgagtccatgccccccgcagagcttgcgcgcgtcgagaagcgcatcttcagccgcgcgctcgaagaggtctgggacgagaccaaaaacttttacattaaccgtcttcacaacccggagaagatccagcgcgccgagcgcgaccccaagctcaagatgtcgctgtgctttcgctggtacctgagcctggcgagccgctgggccaacactggagcttccgatcgcgtcatggactaccaggtctggtgcggtcctgccattggttccttcaacgatttcatcaagggaacttaccttgatccggccgtcgcaaacgagtacccgtgcgtcgttcagattaacaagcagatccttcgtggagcgtgcttcttgcgccgtctcgaaattctgcgcaacgcacgcctttccgatggcgctgccgctcttgtggccagcatcgatgacacatacgtcccggccgagaagctgtaagcggccgcatttaaatggatccactaggccatggtgacttaaggtagttagcttaatcacttaggtcacccagtccaagcccggcctagcacgatgatcatgagtgttgctattgatgtatgttaatactatacacagtcatcgtgtgtgttttataaaactgtaagcttaggatgtttgaggctaatgtaattagcactacaccgtaataaatgagaggtttactttatgttttaataatgttcttacccttgctgctctctaaactgtaatggcgtacggttagctaaactaaagtaaaaatcgattcgcttgagtaaaattagtgaccgggaaagatcatcgactactactgctcagagatgtaatcggtaattaagacttcaagctcaataattaattaggagtaaatctggcttcgaatttttaaattgtcaacttccaaagaaggattggcaagactcaatctcaattgcccaacaaacatatggctctttacaaatttggaatctctttttgatggcaagaacgtcgtaattcctctgtcgatctcatgtaattaccaaactcatctacttattactttctttatatgcacttactgatgcggccgcttaattaatctgacctgaccactagacctgagtgagtacagatgtgctactagtgctagcctcgaggtcgaccaacttttctatacaaagttgtctagacctagctaggactaggcactgagtgactcactgacctgactgagtgactggcggccgcagcttatagtaaagatttttttgttaataaaatgaaagttaatatttatggatttatttgaacatatttacaagtttttgttaataaatttatttacagaagtgttaaatttgaaaatgtgttaaatgagagttaatatttatggatataatattactttatttaaaaataaaatgaatttatattaaaatatgatttggtaaaagatattataaagaggaacttggatgagaaagacgacgatgggcaaaagttgcatggcacaccgcttttgttcagtaacatctgcactgtggcgcctttttcacactcaccatgcatgctgccacgtcagctttcacactatgacaccactggccatacacgttgccacctcagctttctcctcttctcactatgacacgactggccatgcatgcatgcatgctgccacctcagctcccgcctcttcacccgtgtctttctctcatgtcgcagtgctgcgtgccaacctcttctctctataaatagagagaagagaatgatggttaaactcaaaccaaaacaagaaaacatacacaaatagcaaaacggatccacaaccaaaacatatggcgctccgtgtcaagacgaacaagaagccatgctgggagatgaccaaggaggagctgaccagcggcaagaccgaggtgttcaactatgaggaactcctcgagttcgcagagggcgacatcgccaaggtcttcggacccgagttcgccgtcatcgacaagtacccgcgccgcgtgcgcctgcccgcccgcgagtacctgctcgtgacccgcgtcaccctcatggacgccgaggtcaacaactaccgcgtcggcgcccgcatggtcaccgagtacgatctccccgtcaacggagagctctccgagggcggagactgcccctgggccgtcctggtcgagagtggccagtgcgatctcatgctcatctcctacatgggcattgacttccagaaccagggcgaccgcgtctaccgcctgctcaacaccacgctcaccttttacggcgtggcccacgagggcgagaccctcgagtacgacattcgcgtcaccggcttcgccaagcgtctcgacggcggcatctccatgttcttcttcgagtacgactgctacgtcaacggccgcctcctcatcgagatgcgcgatggctgcgccggcttcttcaccaacgaggagctcgacgccggcaagggcgtcgtcttcacccgcggcgacctcgccgcccgcgccaagatcccaaagcaggacgtctccccctacgccgtcgccccctgcctccacaagaccaagctcaacgaaaaggagatgcagaccctcgtcgacaaggactgggcatccgtctttggctccaagaacggcatgccggaaatcaactacaaactctgcgcgcgtaagatgctcatgattgaccgcgtcaccagcattgaccacaagggcggtgtctacggcctcggtcagctcgtcggtgaaaagatcctcgagcgcgaccactggtactttccctgccactttgtcaaggatcaggtcatggccggatccctcgtctccgacggctgcagccagatgctcaagatgtacatgatctggctcggcctccacctcaccaccggaccctttgacttccgcccggtcaacggccaccccaacaaggtccgctgccgcggccaaatctccccgcacaagggcaagctcgtctacgtcatggagatcaaggagatgggcttcgacgaggacaacgacccgtacgccattgccgacgtcaacatcattgatgtcgacttcgaaaagggccaggactttagcctcgaccgcatcagcgactacggcaagggcgacctcaacaagaagatcgtcgtcgactttaagggcatcgctctcaagatgcagaagcgctccaccaacaagaacccctccaaggttcagcccgtctttgccaacggcgccgccactgtcggccccgaggcctccaaggcttcctccggcgccagcgccagcgccagcgccgccccggccaagcctgccttcagcgccgatgttcttgcgcccaagcccgttgcccttcccgagcacatcctcaagggcgacgccctcgcccccaaggagatgtcctggcaccccatggcccgcatcccgggcaacccgacgccctcttttgcgccctcggcctacaagccgcgcaacatcgcctttacgcccttccccggcaaccccaacgataacgaccacaccccgggcaagatgccgctcacctggttcaacatggccgagttcatggccggcaaggtcagcatgtgcctcggccccgagttcgccaagttcgacgactcgaacaccagccgcagccccgcttgggacctcgctctcgtcacccgcgccgtgtctgtgtctgacctcaagcacgtcaactaccgcaacatcgacctcgacccctccaagggtaccatggtcggcgagttcgactgccccgcggacgcctggttctacaagggcgcctgcaacgatgcccacatgccgtactcgatcctcatggagatcgccctccagacctcgggtgtgctcacctcggtgctcaaggcgcccctgaccatggagaaggacgacatcctcttccgcaacctcgacgccaacgccgagttcgtgcgcgccgacctcgactaccgcggcaagactatccgcaacgtcaccaagtgcactggctacagcatgctcggcgagatgggcgtccaccgcttcacctttgagctctacgtcgatgatgtgctcttttacaagggctcgacctcgttcggctggttcgtgcccgaggtctttgccgcccaggccggcctcgacaacggccgcaagtcggagccctggttcattgagaacaaggttccggcctcgcaggtctcctcctttgacgtgcgccccaacggcagcggccgcaccgccatcttcgccaacgcccccagcggcgcccagctcaaccgccgcacggaccagggccagtacctcgacgccgtcgacattgtctccggcagcggcaagaagagcctcggctacgcccacggttccaagacggtcaacccgaacgactggttcttctcgtgccacttttggtttgactcggtcatgcccggaagtctcggtgtcgagtccatgttccagctcgtcgaggccatcgccgcccacgaggatctcgctggcaagcacggcattgccaaccccacctttgtgcacgccccgggcaagatcagctggaagtaccgcggccagctcacgcccaagagcaagaagatggactcggaggtccacatcgtgtccgtggacgcccacgacggcgttgtcgacctcgtcgccgacggcttcctctgggccgacagcctccgcgtctactcggtgagcaacattcgcgtgcgcatcgcctccggtgaggcccctgccgccgcctcctccgccgcctctgtgggctcctcggcttcgtccgtcgagcgcacgcgctcgagccccgctgtcgcctccggcccggcccagaccatcgacctcaagcagctcaagaccgagctcctcgagctcgatgccccgctctacctctcgcaggacccgaccagcggccagctcaagaagcacaccgacgtggcctccggccaggccaccatcgtgcagccctgcacgctcggcgacctcggtgaccgctccttcatggagacctacggcgtcgtcgccccgctgtacacgggcgccatggccaagggcattgcctcggcggacctcgtcatcgccgccggcaagcgcaagatcctcggctcctttggcgccggcggcctccccatgcaccacgtgcgcgccgccctcgagaagatccaggccgccctgcctcagggcccctacgccgtcaacctcatccactcgccttttgacagcaacctcgagaagggcaacgtcgatctcttcctcgagaagggcgtcactgtggtggaggcctcggcattcatgaccctcaccccgcaggtcgtgcgctaccgcgccgccggcctctcgcgcaacgccgacggttcggtcaacatccgcaaccgcatcatcggcaaggtctcgcgcaccgagctcgccgagatgttcatccgcccggccccggagcacctcctcgagaagctcatcgcctcgggcgagatcacccaggagcaggccgagctcgcgcgccgcgttcccgtcgccgacgatatcgctgtcgaggctgactcgggcggccacaccgacaaccgccccatccacgtcatcctcccgctcatcatcaacctccgcaaccgcctgcaccgcgagtgcggctaccccgcgcacctccgcgtccgcgttggcgccggcggtggcgtcggctgcccgcaggccgccgccgccgcgctcaccatgggcgccgccttcatcgtcaccggcactgtcaaccaggtcgccaagcagtccggcacctgcgacaacgtgcgcaagcagctctcgcaggccacctactcggatatctgcatggccccggccgccgacatgttcgaggagggcgtcaagctccaggtcctcaagaagggaaccatgttcccctcgcgcgccaacaagctctacgagctcttttgcaagtacgactccttcgactccatgcctcctgccgagctcgagcgcatcgagaagcgtatcttcaagcgcgcactccaggaggtctgggaggagaccaaggacttttacattaacggtctcaagaacccggagaagatccagcgcgccgagcacgaccccaagctcaagatgtcgctctgcttccgctggtaccttggtcttgccagccgctgggccaacatgggcgccccggaccgcgtcatggactaccaggtctggtgtggcccggccattggcgccttcaacgacttcatcaagggcacctacctcgaccccgctgtctccaacgagtacccctgtgtcgtccagatcaacctgcaaatcctccgtggtgcctgctacctgcgccgtctcaacgccctgcgcaacgacccgcgcattgacctcgagaccgaggatgctgcctttgtctacgagcccaccaacgcgctctaagctagcatttaaatctaggccatggtgacttaaggtagttagcttaatcacttaggtcacccagtccaagcccggcctagcacgatgatcatgagtgttgctattgatgtatgttaatactatacacagtcatcgtgtgtgttttataaaactgtaagcttaggatgtttgaggctaatgtaattagcactacaccgtaataaatgagaggtttactttatgttttaataatgttcttacccttgctgctctctaaactgtaatggcgtacggttagctaaactaaagtaaaaatcgattcgcttgagtaaaattagtgaccgggaaagatcatcgactactactgctcagagatgtaatcggtaattaagacttcaagctcaataattaattaggagtaaatctggcttcgaatttttaaattgtcaacttccaaagaaggattggcaagactcaatctcaattgcccaacaaacatatatggctctttacaaatttggaatctctttttgatggcaagaacgtcgtaattcctctgtcgatctcatgtaattaccaaactcatctacttattactttctttatatgcacttactgatgcggccgcttaattaatcacgagtggatgactgtcacgactgactcatgactgactactagtgctagcctcgaggtcgacacaactttgtataataaagttgtctagacctaggcgagtcatgagtcgtgacatgacgtcatgctcatcagactgcggccgcagcttatagtaaagatttttttgttaataaaatgaaagttaatatttatggatttatttgaacatatttacaagtttttgttaataaatttatttacagaagtgttaaatttgaaaatgtgttaaatgagagttaatatttatggatataatattactttatttaaaaataaaatgaatttatattaaaatatgatttggtaaaagatattataaagaggaacttggatgagaaagacgacgatgggcaaaagttgcatggcacaccgcttttgttcagtaacatctgcactgtggcgcctttttcacactcaccatgcatgctgccacgtcagctttcacactatgacaccactggccatacacgttgccacctcagctttctcctcttctcactatgacacgactggccatgcatgcatgcatgctgccacctcagctcccgcctcttcacccgtgtctttctctcatgtcgcagtgctgcgtgccaacctcttctctctataaatagagagaagagaatgatggttaaactcaaaccaaaacaagaaaacatacacaaatagcaaaacggatccacaaccaacctaccatggctcccactcccgacgccaccgcgcctctgaacaagccgagcgactatgccgtctaccacgaggaagacggccccttctggaccgccgattccagcggcgtctcgcgcgtgaactttagcgagaccggcgtgggatccgagggcgtcatccctgcgctcacgctcatcgacgtcttcgagagggccgtcaagcgcggcggaaacaggatcgccttccgcacggaaaacatgcccacgctccgccgcggcgaagaggccccggacgcgctgccgctcaaggactggaagtcctggtcctggaaacagtacaaggccgacgtccaccgcatcgccagggctctcatggacctcggcgttgagcagcatgacgccgtctccatttttggctttaactcgcccgaatggtttctcagtgccgtcggcgccgtgcacgcaggtgccaagattgccggcatttacccctcagacacgcccgcccaggtccagtacaaggccttccacagtgacaccgctgttgccgttgtcgaaaacgagcagtgcttcaagaagttcgccgaggtcgtcgaggaccttccttacctcaaggccattgtttgctgggactatgaagccacagacatcacgcgcgaggacggctccgtcgtcgaggtcctcacctttgccgagttcctcaagcgcggcgacaccgtcgaggcggccgcccttgacgagcgcatctccaagatcgagcccaccatgtgcgctgcccttatttacaccagcggtactaccggccgccccaaggccgttatgatttcgcacgacaaccttgttttcgaggccagcgccgtcgtccccaacctcggaggagcctgtacgaccactgctgaggagcgcattctctcgtacctgcctctctcgcacgtcgctggtatgatggttgatattattgcccccatcattgccaccgccttccacaagggccgcatctgcgtctgctttgctcgcccgtacgatttgcgcaccggcacgctgggccagcgcctcaacgccgtggagcccaccatcttccttggcgtgccccgtgtgtgggaaaagattcaggaaaagctcatggccgtcggtgccaaaaccaccggcctcaagaagaagctctctacggccgccaagaagcgtggtcttgaattccaggaggagcagcaaatcggccgctccggtgccaaccctggctttggcccccttggcatctacaagaagctcctcggcctcatcaagggcaagctgggcctcaccaagtgcaagtttgcctttgctggtgccgcgcccatgacccgtgagacccttcagtactttggcgcgctgaacatcaacattaacgaggtctacggcatgtccgagtgctccggtgccgccacctggtccacggacaaggcccacgagtggggcactgttggctacgagatgcccagttgcgaggtccgcgtcttcaagattgccgaggacggtaccaagaccgagtgcccgcgcgccgccgacattatgcatgctaccgaggaggagcagggcgaagtttgcttccgcggccgtaacatcatgatgggctaccttgccaaccccaagcttggcgacgaccacgttgccgagatcgaggagaagaacgctgccgctatcgactccgagggctggctccacagtggtgataagggcgccatttctacccgcggcatgctcaagatcacgggccgctacaaggagctcatcatcggcgccggtggcgagaacgtggcgcccgtccctattgaggacgccatcaaggcgcgcatgccttttgtttccaacgccatgatggtcggagataagcgcaagttcatggctgtcctccttaccctcaagacggttggcgccacgggcgagcttcccggtacgaacaagctcatgggcgctgccgccgactatggtgagaccatcgaggacgcctgcgacaacgaggcgctcattgaggagatcacgcagcagctcaaggagatcggtgatgatggcgatgtcacgccctcgaacgcggctcgcatccaaaagttcaccattctcccgctcgacttttccgtctccacggacgagctcacggccacgctcaagctcaagcgctccgtggtcgcagacaagtacgaagacatcatcgaggccttttacgagtccaagagcgtttttgtgccgtactcgaccgttggcgcctacgccacgggcggcccggtcgacgactccgttgtcgatggctccttcaagggcgactttagcatgattggcgacgatgatccggatcttcaaaacgtcgatgtcctcgaggcgattgacgaggacaattaaatttccagtccaagcccggcctagcacgatgatcatgagtgttgctattgatgtatgttaatactatacacagtcatcgtgtgtgttttataaaactgtaagcttaggatgtttgaggctaatgtaattagcactacaccgtaataaatgagaggtttactttatgttttaataatgttcttacccttgctgctctctaaactgtaatggcgtacggttagctaaactaaagtaaaaatcgattcgcttgagtaaaattagtgaccgggaaagatcatcgactactactgctcagagatgtaatcggtaattaagacttcaagctcaataattaattaggagtaaatctggcttcgaatttttaaattgtcaacttccaaagaaggattggcaagactcaatctcaattgcccaacaaacatatggctctttacaaatttggaatctctttttgatggcaagaacgtcgtaattcctctgtcgatctcatgtaattaccaaactcatctacttattactttctttatatgcacttactgatgcggccgcttaattaatctgatcatggatgctacgtcacggcagtacaggactatcactagagtcactggtcacatcagcggccgcagcttatagtaaagatttttttgttaataaaatgaaagttaatatttatggatttatttgaacatatttacaagtttttgttaataaatttatttacagaagtgttaaatttgaaaatgtgttaaatgagagttaatatttatggatataatattactttatttaaaaataaaatgaatttatattaaaatatgatttggtaaaagatattataaagaggaacttggatgagaaagacgacgatgggcaaaagttgcatggcacaccgcttttgttcagtaacatctgcactgtggcgcctttttcacactcaccatgcatgctgccacgtcagctttcacactatgacaccactggccatacacgttgccacctcagctttctcctcttctcactatgacacgactggccatgcatgcatgcatgctgccacctcagctcccgcctcttcacccgtgtctttctctcatgtcgcagtgctgcgtgccaacctcttctctctataaatagagagaagagaatgatggttaaactcaaaccaaaacaagaaaacatacacaaatagcaaaacggatccacaaccaaaaatgttgcagcatacttggctaccaaaacccccaaatttaaccttattgtcagatgaagttcatctctggcgcattccccttgaccaaccagaatcacagctacaggatttagccgctaccttatctagtgacgaattagcccgtgcaaacagattttattttcccgaacatcgccggcgttttactgctggtcgtggtattctccgcagtatcttggggggctatttgggtgtggaaccagggcaagttaaatttgattatgaatcccgtggtaaaccaatattaggcgatcgctttgccgagagtggtttattatttaacttgtcacactcccagaacttggccttgtgtgcagtcaattacacgcgccaaatcggcatcgatttagaatatctccgccccacatctgatttagaatcccttgccaaaaggttctttttaccgcgagaatatgaattattgcgatcgctacccgatgagcaaaaacaaaaaattttctttcgttactggacttgtaaagaggcttatcttaaagcaacgggtgacggcatcgctaaattagaggaaattgaaatagcactaactcccacagaaccagctaagttacagacagctccagcgtggagtctcctagagctagtgccagatgataattgtgttgctgctgttgccgtggcgggttttggctggcagccaaaattctggcattattgagtagttagcttaatcacttaggtcacccagtccaagcccggcctagcacgatgatcatgagtgttgctattgatgtatgttaatactatacacagtcatcgtgtgtgttttataaaactgtaagcttaggatgtttgaggctaatgtaattagcactacaccgtaataaatgagaggtttactttatgttttaataatgttcttacccttgctgctctctaaactgtaatggcgtacggttagctaaactaaagtaaaaatcgattcgcttgagtaaaattagtgaccgggaaagatcatcgactactactgctcagagatgtaatcggtaattaagacttcaagctcaataattaattaggagtaaatctggcttcgaatttttaaattgtcaacttccaaagaaggattggcaagactcaatctcaattgcccaacaaacatatggctctttacaaatttggaatctctttttgatggcaagaacgtcgtaattcctctgtcgatctcatgtaattaccaaactcatctacttattactttctttatatgcacttactgatgcctagtgctagcctcgaggtcgacacccagcttt

SEQ ID NO: 40 - DNA, 35302 bp, Artificial sequence
  plasmid pDAB7368
ttgtacaaagtggttgcggccgcttaattaaatttaaattcaattaatgcaatcttgattttcaacaacgaaggtaatggcgtaaaagaaaaaatgtatgttattgtattgatctttcatgatgttgaagcgtgccataatatgatgatgtataattaaaatattaactgtcgcattttattgaaatggcactgttatttcaaccatatctttgattctgttacatgacacgactgcaagaagtaaataatagacgccgttgttaaagaattgctatcatatgtgcctaactagagggaatttgagcgtcagacctaatcaaatattacaaaatatctcactctgtcgccagcaatggtgtaatcagcgcagacaaatggcgtaaagatcgcggaaaaacctccccgagtggcatgatagctgcctctgtattgctgatttagtcagccttatttgacttaagggtgccctcgttagtgacaaattgctttcaaggagacagccatgccccacactttgttgaaaaacaaattgcctttggggagacggtaaagccagttgctcttcaataaggaatgtcgaggaggcaatgtaaccgcctctggtagtacacttctctaatccaaaaatcaatttgtattcaagataccgcaaaaaacttatggtttaaaccctgcaggactagtccagaaggtaattatccaagatgtagcatcaagaatccaatgtttacgggaaaaactatggaagtattatgtaagctcagcaagaagcagatcaatatgcggcacatatgcaacctatgttcaaaaatgaagaatgtacagatacaagatcctatactgccagaatacgaagaagaatacgtagaaattgaaaaagaagaaccaggcgaagaaaagaatcttgaagacgtaagcactgacgacaacaatgaaaagaagaagataaggtcggtgattgtgaaagagacatagaggacacatgtaaggtggaaaatgtaagggcggaaagtaaccttatcacaaaggaatcttatcccccactacttatccttttatatttttccgtgtcatttttgcccttgagttttcctatataaggaaccaagttcggcatttgtgaaaacaagaaaaaatttggtgtaagctattttctttgaagtactgaggatacaacttcagagaaatttgtaagtttgtaggtaccagatctggatcccaaaccatgtctccggagaggagaccagttgagattaggccagctacagcagctgatatggccgcggtttgtgatatcgttaaccattacattgagacgtctacagtgaactttaggacagagccacaaacaccacaagagtggattgatgatctagagaggttgcaagatagatacccttggttggttgctgaggttgagggtgttgtggctggtattgcttacgctgggccctggaaggctaggaacgcttacgattggacagttgagagtactgtttacgtgtcacataggcatcaaaggttgggcctaggatctacattgtacacacatttgcttaagtctatggaggcgcaaggttttaagtctgtggttgctgttataggccttccaaacgatccatctgttaggttgcatgaggctttgggatacacagcccggggtacattgcgcgcagctggatacaagcatggtggatggcatgatgttggtttttggcaaagggattttgagttgccagctcctccaaggccagttaggccagttacccaaatctgagtagttagcttaatcacctagagctcgatcggcggcaatagcttcttagcgccatcccgggttgatcctatctgtgttgaaatagttgcggtgggcaaggctctctttcagaaagacaggcggccaaaggaacccaaggtgaggtgggctatggctctcagttccttgtggaagcgcttggtctaaggtgcagaggtgttagcgggatgaagcaaaagtgtccgattgtaacaagatatgttgatcctacgtaaggatattaaagtatgtattcatcactaatataatcagtgtattccaatatgtactacgatttccaatgtctttattgtcgccgtatgtaatcggcgtcacaaaataatccccggtgactttcttttaatccaggatgaaataatatgttattataatttttgcgatttggtccgttataggaattgaagtgtgcttgaggtcggtcgccaccactcccatttcataattttacatgtatttgaaaaataaaaatttatggtattcaatttaaacacgtatacttgtaaagaatgatatcttgaaagaaatatagtttaaatatttattgataaaataacaagtcaggtattatagtccaagcaaaaacataaatttattgatgcaagtttaaattcagaaatatttcaataactgattatatcagctggtacattgccgtagatgaaagactgagtgcgatattatggtgtaatacataggaattcgtttaaacgatctgcgtctaattttcggtccaacttgcacaggaaagacgtcgaccgcggtagctcttgcccagcagactgggcttccagtcctttcgctcgatcgggtccaatgttgtcctcagctgtgaaccggaagcggacgaccaacagtggaagaactgaaaggaacgagccgtctataccttgatgatcggcctctggtgaagggtatcatcgcagccaagcaagctcatgaaaggctgatgggggaggtgtataattatgaggcccacggcgggcttattctttagggaggatctatctcgttgctcaagtgcatggcgcaaagcagttattggagtgcggattttcgttggcatattattcgccacgagttagcagacgaagagaccttcatgaacgtggccaaggccagagttaagcagatgttacgccctgctgcaggcctttctattatccaatagttggttgatctttggaaagagcctcggctgaggcccatactgaaagagatcgatggatatcgatatgccatgttgtttgctagccagaaccagatcacatccgatatgctattgcagcttgacgcagatatggaggataagttgattcatgggatcgctcaggagtagctcatccatgcacgccgacaagaacagaaattccgtcgagttaacgcagccgcttacgacggattcgaaggtcatccattcggaatgtattagtttgcaccagctccgcgtcacacctgtcttcatttgaataagatgttagcaattgtttttagctttgtcttgttgtggcagggcggcaagtgcttcagacatcattctgttttcaaattttatgctggagaacagcttcttaattcctttggaaataatagactgcgtcttaaaattcagatgtctggatatagatatgattgtaaaataacctatttaagtgtcatttagaacataagttttatgaatgttcttccattttcgtcatcgaacgaataagagtaaatacaccttttttaacattacaaataagttcttatacgttgtttatacaccgggaatcatttccattattttcgcgcaaaagtcacggatattcgtgaaagcgacataaactgcgaaatttgcggggagtgtcttgagtttgcctcgaggctagcgcatgcacatagacacacacatcatctcattgatgcttggtaataattgtcattagattgtttttatgcatagatgcactcgaaatcagccaattttagacaagtatcaaacggatgtgacttcagtacattaaaaacgtccgcaatgtgttattaagttgtctaagcgtcaatttgatttacaattgaatatatcctgccccagccagccaacagctcgatttacaattgaatatatcctgccggccggcccacgcgtgtcgaggaattctgatctggcccccatttggacgtgaatgtagacacgtcgaaataaagatttccgaattagaataatttgtttattgctttcgcctataaatacgacggatcgtaatttgtcgttttatcaaaatgtactttcattttataataacgctgcggacatctacatttttgaattgaaaaaaaattggtaattactctttctttttctccatattgaccatcatactcattgctgatccatgtagatttcccggacatgaagccatttacaattgaatatatcctgccgccgctgccgctttgcacccggtggagcttgcatgttggtttctacgcagaactgagccggttaggcagataatttccattgagaactgagccatgtgcaccttccccccaacacggtgagcgacggggcaacggagtgatccacatgggacttttaaacatcatccgtcggatggcgttgcgagagaagcagtcgatccgtgagatcagccgacgcaccgggcaggcgcgcaacacgatcgcaaagtatttgaacgcaggtacaatcgagccgacgttcacgcggaacgaccaagcaagcttggctgccatttttggggtgaggccgttcgcggccgaggggcgcagcccctggggggatgggaggcccgcgttagcgggccgggagggttcgagaagggggggcaccccccttcggcgtgcgcggtcacgcgcacagggcgcagccctggttaaaaacaaggtttataaatattggtttaaaagcaggttaaaagacaggttagcggtggccgaaaaacgggcggaaacccttgcaaatgctggattttctgcctgtggacagcccctcaaatgtcaataggtgcgcccctcatctgtcagcactctgcccctcaagtgtcaaggatcgcgcccctcatctgtcagtagtcgcgcccctcaagtgtcaataccgcagggcacttatccccaggcttgtccacatcatctgtgggaaactcgcgtaaaatcaggcgttttcgccgatttgcgaggctggccagctccacgtcgccggccgaaatcgagcctgcccctcatctgtcaacgccgcgccgggtgagtcggcccctcaagtgtcaacgtccgcccctcatctgtcagtgagggccaagttttccgcgaggtatccacaacgccggcggccgcggtgtctcgcacacggcttcgacggcgtttctggcgcgtttgcagggccatagacggccgccagcccagcggcgagggcaaccagcccggtgagcgtcggaaagggtcgacggatcttttccgctgcataaccctgcttcggggtcattatagcgattttttcggtatatccatcctttttcgcacgatatacaggattttgccaaagggttcgtgtagactttccttggtgtatccaacggcgtcagccgggcaggataggtgaagtaggcccacccgcgagcgggtgttccttcttcactgtcccttattcgcacctggcggtgctcaacgggaatcctgctctgcgaggctggccggctaccgccggcgtaacagatgagggcaagcggatggctgatgaaaccaagccaaccaggaagggcagcccacctatcaaggtgtactgccttccagacgaacgaagagcgattgaggaaaaggcggcggcggccggcatgagcctgtcggcctacctgctggccgtcggccagggctacaaaatcacgggcgtcgtggactatgagcacgtccgcgagctggcccgcatcaatggcgacctgggccgcctgggcggcctgctgaaactctggctcaccgacgacccgcgcacggcgcggttcggtgatgccacgatcctcgccctgctggcgaagatcgaagagaagcaggacgagcttggcaaggtcatgatgggcgtggtccgcccgagggcagagccatgacttttttagccgctaaaacggccggggggtgcgcgtgattgccaagcacgtccccatgcgctccatcaagaagagcgacttcgcggagctggtattcgtgcagggcaagattcggaataccaagtacgagaaggacggccagacggtctacgggaccgacttcattgccgataaggtggattatctggacaccaaggcaccaggcgggtcaaatcaggaataagggcacattgccccggcgtgagtcggggcaatcccgcaaggagggtgaatgaatcggacgtttgaccggaaggcatacaggcaagaactgatcgacgcggggttttccgccgaggatgccgaaaccatcgcaagccgcaccgtcatgcgtgcgccccgcgaaaccttccagtccgtcggctcgatggtccagcaagctacggccaagatcgagcgcgacagcgtgcaactggctccccctgccctgcccgcgccatcggccgccgtggagcgttcgcgtcgtctcgaacaggaggcggcaggtttggcgaagtcgatgaccatcgacacgcgaggaactatgacgaccaagaagcgaaaaaccgccggcgaggacctggcaaaacaggtcagcgaggccaagcaggccgcgttgctgaaacacacgaagcagcagatcaaggaaatgcagctttccttgttcgatattgcgccgtggccggacacgatgcgagcgatgccaaacgacacggcccgctctgccctgttcaccacgcgcaacaagaaaatcccgcgcgaggcgctgcaaaacaaggtcattttccacgtcaacaaggacgtgaagatcacctacaccggcgtcgagctgcgggccgacgatgacgaactggtgtggcagcaggtgttggagtacgcgaagcgcacccctatcggcgagccgatcaccttcacgttctacgagctttgccaggacctgggctggtcgatcaatggccggtattacacgaaggccgaggaatgcctgtcgcgcctacaggcgacggcgatgggcttcacgtccgaccgcgttgggcacctggaatcggtgtcgctgctgcaccgcttccgcgtcctggaccgtggcaagaaaacgtcccgttgccaggtcctgatcgacgaggaaatcgtcgtgctgtttgctggcgaccactacacgaaattcatatgggagaagtaccgcaagctgtcgccgacggcccgacggatgttcgactatttcagctcgcaccgggagccgtacccgctcaagctggaaaccttccgcctcatgtgcggatcggattccacccgcgtgaagaagtggcgcgagcaggtcggcgaagcctgcgaagagttgcgaggcagcggcctggtggaacacgcctgggtcaatgatgacctggtgcattgcaaacgctagggccttgtggggtcagttccggctgggggttcagcagccagcgctttactggcatttcaggaacaagcgggcactgctcgacgcacttgcttcgctcagtatcgctcgggacgcacggcgcgctctacgaactgccgataaacagaggattaaaattgacaattgtgattaaggctcagattcgacggcttggagcggccgacgtgcaggatttccgcgagatccgattgtcggccctgaagaaagctccagagatgttcgggtccgtttacgagcacgaggagaaaaagcccatggaggcgttcgctgaacggttgcgagatgccgtggcattcggcgcctacatcgacggcgagatcattgggctgtcggtcttcaaacaggaggacggccccaaggacgctcacaaggcgcatctgtccggcgttttcgtggagcccgaacagcgaggccgaggggtcgccggtatgctgctgcgggcgttgccggcgggtttattgctcgtgatgatcgtccgacagattccaacgggaatctggtggatgcgcatcttcatcctcggcgcacttaatatttcgctattctggagcttgttgtttatttcggtctaccgcctgccgggcggggtcgcggcgacggtaggcgctgtgcagccgctgatggtcgtgttcatctctgccgctctgctaggtagcccgatacgattgatggcggtcctgggggctatttgcggaactgcgggcgtggcgctgttggtgttgacaccaaacgcagcgctagatcctgtcggcgtcgcagcgggcctggcgggggcggtttccatggcgttcggaaccgtgctgacccgcaagtggcaacctcccgtgcctctgctcacctttaccgcctggcaactggcggccggaggacttctgctcgttccagtagctttagtgtttgatccgccaatcccgatgcctacaggaaccaatgttctcggcctggcgtggctcggcctgatcggagcgggtttaacctacttcctttggttccgggggatctcgcgactcgaacctacagttgtttccttactgggctttctcagcccccgagcgcttagtgggaatttgtaccccttatcgaaccgggagcacaggatgacgcctaacaattcattcaagccgacaccgcttcgcggcgcggcttaattcaggagttaaacatcatgagggaagcggtgatcgccgaagtatcgactcaactatcagaggtagttggcgtcatcgagcgccatctcgaaccgacgttgctggccgtacatttgtacggctccgcagtggatggcggcctgaagccacacagtgatattgatttgctggttacggtgaccgtaaggcttgatgaaacaacgcggcgagctttgatcaacgaccttttggaaacttcggcttcccctggagagagcgagattctccgcgctgtagaagtcaccattgttgtgcacgacgacatcattccgtggcgttatccagctaagcgcgaactgcaatttggagaatggcagcgcaatgacattcttgcaggtatcttcgagccagccacgatcgacattgatctggctatcttgctgacaaaagcaagagaacatagcgttgccttggtaggtccagcggcggaggaactctttgatccggttcctgaacaggatctatttgaggcgctaaatgaaaccttaacgctatggaactcgccgcccgactgggctggcgatgagcgaaatgtagtgcttacgttgtcccgcatttggtacagcgcagtaaccggcaaaatcgcgccgaaggatgtcgctgccgactgggcaatggagcgcctgccggcccagtatcagcccgtcatacttgaagctaggcaggcttatcttggacaagaagatcgcttggcctcgcgcgcagatcagttggaagaatttgttcactacgtgaaaggcgagatcaccaaggtagtcggcaaataatgtctaacaattcgttcaagccgacgccgcttcgcggcgcggcttaactcaagcgttagagagctggggaagactatgcgcgatctgttgaaggtggttctaagcctcgtcttgcgatggcatttcgatccattcccattccgcgctcaagatggcttcccctcggcagttcatcagggctaaatcaatctagccgacttgtccggtgaaatgggctgcactccaacagaaacaatcaaacaaacatacacagcgacttattcacacgagctcaaattacaacggtatatatcctgccagtcagcatcatcacaccaaaagttaggcccgaatagtttgaaattagaaagctcgcaattgaggtctacaggccaaattcgctcttagccgtacaatattactcaccggatcctaaccggtttaattaaggcgcgccatgcccgggcaagcggccgcacaagtttgtacaaaaaagcaggcttctagacctagctaggtggagtcatcacgcagactatctcagcatgtgcgtagcacgcggccgcagcttatagtaaagatttttttgttaataaaatgaaagttaatatttatggatttatttgaacatatttacaagtttttgttaataaatttatttacagaagtgttaaatttgaaaatgtgttaaatgagagttaatatttatggatataatattactttatttaaaaataaaatgaatttatattaaaatatgatttggtaaaagatattataaagaggaacttggatgagaaagacgacgatgggcaaaagttgcatggcacaccgcttttgttcagtaacatctgcactgtggcgcctttttcacactcaccatgcatgctgccacgtcagctttcacactatgacaccactggccatacacgttgccacctcagctttctcctcttctcactatgacacgactggccatgcatgcatgcatgctgccacctcagctcccgcctcttcacccgtgtctttctctcatgtcgcagtgctgcgtgccaacctcttctctctataaatagagagaagagaatgatggttaaactcaaaccaaaacaagaaaacatacacaaatagcaaaacggatccacaaccaaaaatggcggcccgtctgcaggagcaaaagggaggcgagatggatacccgcattgccatcatcggcatgtcggccatcctcccctgcggcacgaccgtgcgcgagtcgtgggagaccatccgcgccggcatcgactgcctgtcggatctccccgaggaccgcgtcgacgtgacggcgtactttgaccccgtcaagaccaccaaggacaagatctactgcaagcgcggtggcttcattcccgagtacgactttgacgcccgcgagttcggactcaacatgttccagatggaggactcggacgcaaaccagaccatctcgcttctcaaggtcaaggaggccctccaggacgccggcatcgacgccctcggcaaggaaaagaagaacatcggctgcgtgctcggcattggcggcggccaaaagtccagccacgagttctactcgcgccttaattatgttgtcgtggagaaggtcctccgcaagatgggcatgcccgaggaggacgtcaaggtcgccgtcgaaaagtacaaggccaacttccccgagtggcgcctcgactccttccctggcttcctcggcaacgtcaccgccggtcgctgcaccaacaccttcaacctcgacggcatgaactgcgttgtcgacgccgcatgcgcctcgtccctcatcgccgtcaaggtcgccatcgacgagctgctctacggtgactgcgacatgatggtcaccggtgccacctgcacggataactccatcggcatgtacatggccttctccaagacccccgtgttctccacggaccccagcgtgcgcgcctacgacgaaaagacaaagggcatgctcatcggcgagggctccgccatgctcgtcctcaagcgctacgccgacgccgtccgcgacggcgatgagatccacgctgttattcgcggctgcgcctcctccagtgatggcaaggccgccggcatctacacgcccaccatttcgggccaggaggaggccctccgccgcgcctacaaccgcgcctgtgtcgacccggccaccgtcactctcgtcgagggtcacggcaccggtactcccgttggcgaccgcatcgagctcaccgccttgcgcaacctctttgacaaggcctacggcgagggcaacaccgaaaaggtcgctgtgggcagcatcaagtccagcatcggccatctcaaggccgtcgccggtctcgccggtatgatcaaggtcatcatggcgctcaagcacaagactctcccgggcaccatcaacgtcgacaacccacccaacctctacgacaacacgcccatcaacgagtcctcgctctacattaacaccatgaaccgcccctggttcccgccccctggtgtgccccgccgcgccggcatttcgagctttggctttggtggcgccaactaccacgccgtcctcgaggaggccgagcccgagcacacgaccgcgtaccgcctcaacaagcgcccgcagcccgtgctcatgatggccgccacgcccgcggccctccagtcgctctgcgaggcccagctcaaggagttcgaggccgccatcaaggagaacgagaccgtcaagaacaccgcctacatcaagtgcgtcaagttcggcgagcagttcaaattccctggctccatcccggccacaaacgcgcgcctcggcttcctcgtcaaggatgctgaggatgcctgctccaccctccgtgccatctgcgcccaattcgccaaggatgtcaccaaggaggcctggcgcctcccccgcgagggcgtcagcttccgcgccaagggcatcgccaccaacggcgctgtcgccgcgctcttctccggccagggcgcgcagtacacgcacatgtttagcgaggtggccatgaactggccccagttccgccagagcattgccgccatggacgccgcccagtccaaggtcgctggaagcgacaaggactttgagcgcgtctcccaggtcctctacccgcgcaagccgtacgagcgtgagcccgagcaggaccacaagaagatctccctcaccgcctactcgcagccctcgaccctggcctgcgctctcggtgcctttgagatcttcaaggaggccggcttcaccccggactttgccgccggccattcgctcggtgagttcgccgccctctacgccgcgggctgcgtcgaccgcgacgagctctttgagcttgtctgccgccgcgcccgcatcatgggcggcaaggacgcaccggccacccccaagggctgcatggccgccgtcattggccccaacgccgagaacatcaaggtccaggccgccaacgtctggctcggcaactccaactcgccttcgcagaccgtcatcaccggctccgtcgaaggtatccaggccgagagcgcccgcctccagaaggagggcttccgcgtcgtgcctcttgcctgcgagagcgccttccactcgccccagatggagaacgcctcgtcggccttcaaggacgtcatctccaaggtctccttccgcacccccaaggccgagaccaagctcttcagcaacgtctctggcgagacctaccccacggacgcccgcgagatgcttacgcagcacatgaccagcagcgtcaagttcctcacccaggtccgcaacatgcaccaggccggtgcgcgcatctttgtcgagttcggacccaagcaggtgctctccaagcttgtctccgagaccctcaaggatgacccctcggttgtcaccgtctctgtcaacccggcctcgggcacggattcggacatccagctccgcgacgcggccgtccagctcgttgtcgctggcgtcaaccttcagggctttgacaagtgggacgcccccgatgccacccgcatgcaggccatcaagaagaagcgcactaccctccgcctttcggccgccacctacgtctcggacaagaccaagaaggtccgcgacgccgccatgaacgatggccgctgcgtcacctacctcaagggcgccgcaccgctcatcaaggccccggagcccgttgtcgacgaggccgccaagcgcgaggccgagcgtctccagaaggagcttcaggatgcccagcgccagctcgacgacgccaagcgcgccgccgccgaggccaactccaagctcgccgctgccaaggaggaggccaagaccgccgctgcttcggccaagcccgcagttgacactgctgttgtcgaaaagcatcgtgccatcctcaagtccatgctcgcggagctcgatggctacggatcggtcgacgcttcttccctccagcagcagcagcagcagcagacggcccccgccccggtcaaggctgctgcgcctgccgcccccgttgcctcggcccctgccccggctgtctcgaacgagcttcttgagaaggccgagactgtcgtcatggaggtcctcgccgccaagaccggctacgagaccgacatgatcgaggctgacatggagctcgagaccgagctcggcattgactccatcaagcgtgtcgagatcctctccgaggtccaggccatgctcaatgtcgaggccaaggatgtcgatgccctcagccgcactcgcactgttggtgaggttgtcaacgccatgaaggccgagatcgctggcagctctgccccggcgcctgctgccgctgctccggctccggccaaggctgcccctgccgccgctgcgcctgctgtctcgaacgagcttctcgagaaggccgagaccgtcgtcatggaggtcctcgccgccaagactggctacgagactgacatgatcgagtccgacatggagctcgagactgagctcggcattgactccatcaagcgtgtcgagatcctctccgaggttcaggccatgctcaacgtcgaggccaaggacgtcgacgctctcagccgcactcgcactgtgggtgaggtcgtcaacgccatgaaggctgagatcgctggtggctctgccccggcgcctgccgccgctgccccaggtccggctgctgccgcccctgcgcctgccgccgccgcccctgctgtctcgaacgagcttcttgagaaggccgagaccgtcgtcatggaggtcctcgccgccaagactggctacgagactgacatgatcgagtccgacatggagctcgagaccgagctcggcattgactccatcaagcgtgtcgagattctctccgaggtccaggccatgctcaacgtcgaggccaaggacgtcgacgctctcagccgcacccgcactgttggcgaggtcgtcgatgccatgaaggccgagatcgctggtggctctgccccggcgcctgccgccgctgctcctgctccggctgctgccgcccctgcgcctgccgcccctgcgcctgctgtctcgagcgagcttctcgagaaggccgagactgtcgtcatggaggtcctcgccgccaagactggctacgagactgacatgatcgagtccgacatggagctcgagaccgagctcggcattgactccatcaagcgtgtcgagattctctccgaggtccaggccatgctcaacgtcgaggccaaggacgtcgacgctctcagccgcacccgcactgttggcgaggtcgtcgatgccatgaaggccgagatcgctggtggctctgccccggcgcctgccgccgctgctcctgctccggctgctgccgcccctgcgcctgccgcccctgcgcctgccgcccctgcgcctgctgtctcgagcgagcttctcgagaaggccgagactgtcgtcatggaggtcctcgccgccaagactggctacgagactgacatgattgagtccgacatggagctcgagaccgagctcggcattgactccatcaagcgtgtcgagattctctccgaggttcaggccatgctcaacgtcgaggccaaggacgtcgacgctctcagccgcactcgcactgttggtgaggtcgtcgatgccatgaaggctgagatcgctggcagctccgcctcggcgcctgccgccgctgctcctgctccggctgctgccgctcctgcgcccgctgccgccgcccctgctgtctcgaacgagcttctcgagaaagccgagactgtcgtcatggaggtcctcgccgccaagactggctacgagactgacatgatcgagtccgacatggagctcgagactgagctcggcattgactccatcaagcgtgtcgagatcctctccgaggttcaggccatgctcaacgtcgaggccaaggacgtcgatgccctcagccgcacccgcactgttggcgaggttgtcgatgccatgaaggccgagatcgctggtggctctgccccggcgcctgccgccgctgcccctgctccggctgccgccgcccctgctgtctcgaacgagcttctcgagaaggccgagactgtcgtcatggaggtcctcgccgccaagactggctacgagaccgacatgatcgagtccgacatggagctcgagaccgagctcggcattgactccatcaagcgtgtcgagattctctccgaggttcaggccatgctcaacgtcgaggccaaggacgtcgatgctctcagccgcactcgcactgttggcgaggtcgtcgatgccatgaaggctgagatcgccggcagctccgccccggcgcctgccgccgctgctcctgctccggctgctgccgctcctgcgcccgctgccgctgcccctgctgtctcgagcgagcttctcgagaaggccgagaccgtcgtcatggaggtcctcgccgccaagactggctacgagactgacatgattgagtccgacatggagctcgagactgagctcggcattgactccatcaagcgtgtcgagatcctctccgaggttcaggccatgctcaacgtcgaggccaaggacgtcgatgccctcagccgcacccgcactgttggcgaggttgtcgatgccatgaaggccgagatcgctggtggctctgccccggcgcctgccgccgctgcccctgctccggctgccgccgcccctgctgtctcgaacgagcttcttgagaaggccgagaccgtcgtcatggaggtcctcgccgccaagactggctacgagaccgacatgatcgagtccgacatggagctcgagaccgagctcggcattgactccatcaagcgtgtcgagattctctccgaggttcaggccatgctcaacgtcgaggccaaggacgtcgacgctctcagccgcactcgcactgttggcgaggtcgtcgatgccatgaaggctgagatcgctggtggctctgccccggcgcctgccgccgctgctcctgcctcggctggcgccgcgcctgcggtcaagattgactcggtccacggcgctgactgtgatgatctttccctgatgcacgccaaggtggttgacatccgccgcccggacgagctcatcctggagcgccccgagaaccgccccgttctcgttgtcgatgacggcagcgagctcaccctcgccctggtccgcgtcctcggcgcctgcgccgttgtcctgacctttgagggtctccagctcgctcagcgcgctggtgccgctgccatccgccacgtgctcgccaaggatctttccgcggagagcgccgagaaggccatcaaggaggccgagcagcgctttggcgctctcggcggcttcatctcgcagcaggcggagcgcttcgagcccgccgaaatcctcggcttcacgctcatgtgcgccaagttcgccaaggcttccctctgcacggctgtggctggcggccgcccggcctttatcggtgtggcgcgccttgacggccgcctcggattcacttcgcagggcacttctgacgcgctcaagcgtgcccagcgtggtgccatctttggcctctgcaagaccatcggcctcgagtggtccgagtctgacgtcttttcccgcggcgtggacattgctcagggcatgcaccccgaggatgccgccgtggcgattgtgcgcgagatggcgtgcgctgacattcgcattcgcgaggtcggcattggcgcaaaccagcagcgctgcacgatccgtgccgccaagctcgagaccggcaacccgcagcgccagatcgccaaggacgacgtgctgctcgtttctggcggcgctcgcggcatcacgcctctttgcatccgggagatcacgcgccagatcgcgggcggcaagtacattctgcttggccgcagcaaggtctctgcgagcgaaccggcatggtgcgctggcatcactgacgagaaggctgtgcaaaaggctgctacccaggagctcaagcgcgcctttagcgctggcgagggccccaagcccacgccccgcgctgtcactaagcttgtgggctctgttcttggcgctcgcgaggtgcgcagctctattgctgcgattgaagcgctcggcggcaaggccatctactcgtcgtgcgacgtgaactctgccgccgacgtggccaaggccgtgcgcgatgccgagtcccagctcggtgcccgcgtctcgggcatcgttcatgcctcgggcgtgctccgcgaccgtctcatcgagaagaagctccccgacgagttcgacgccgtctttggcaccaaggtcaccggtctcgagaacctcctcgccgccgtcgaccgcgccaacctcaagcacatggtcctcttcagctcgctcgccggcttccacggcaacgtcggccagtctgactacgccatggccaacgaggcccttaacaagatgggcctcgagctcgccaaggacgtctcggtcaagtcgatctgcttcggtccctgggacggtggcatggtgacgccgcagctcaagaagcagttccaggagatgggcgtgcagatcatcccccgcgagggcggcgctgataccgtggcgcgcatcgtgctcggctcctcgccggctgagatccttgtcggcaactggcgcaccccgtccaagaaggtcggctcggacaccatcaccctgcaccgcaagatttccgccaagtccaaccccttcctcgaggaccacgtcatccagggccgccgcgtgctgcccatgacgctggccattggctcgctcgcggagacctgcctcggcctcttccccggctactcgctctgggccattgacgacgcccagctcttcaagggtgtcactgtcgacggcgacgtcaactgcgaggtgaccctcaccccgtcgacggcgccctcgggccgcgtcaacgtccaggccacgctcaagaccttttccagcggcaagctggtcccggcctaccgcgccgtcatcgtgctctccaaccagggcgcgcccccggccaacgccaccatgcagccgccctcgctcgatgccgatccggcgctccagggctccgtctacgacggcaagaccctcttccacggcccggccttccgcggcatcgatgacgtgctctcgtgcaccaagagccagcttgtggccaagtgcagcgctgtccccggctccgacgccgctcgcggcgagtttgccacggacactgacgcccatgaccccttcgtgaacgacctggcctttcaggccatgctcgtctgggtgcgccgcacgctcggccaggctgcgctccccaactcgatccagcgcatcgtccagcaccgcccggtcccgcaggacaagcccttctacattaccctccgctccaaccagtcgggcggtcactcccagcacaagcacgcccttcagttccacaacgagcagggcgatctcttcattgatgtccaggcttcggtcatcgccacggacagccttgccttctaaatctaaactaggccatggtgacttaaggtagttagcttaatcacttaggtcacccagtccaagcccggcctagcacgatgatcatgagtgttgctattgatgtatgttaatactatacacagtcatcgtgtgtgttttataaaactgtaagcttaggatgtttgaggctaatgtaattagcactacaccgtaataaatgagaggtttactttatgttttaataatgttcttacccttgctgctctctaaactgtaatggcgtacggttagctaaactaaagtaaaaatcgattcgcttgagtaaaattagtgaccgggaaagatcatcgactactactgctcagagatgtaatcggtaattaagacttcaagctcaataattaattaggagtaaatctggcttcgaatttttaaattgtcaacttccaaagaaggattggcaagactcaatctcaattgcccaacaaacatatggctctttacaaatttggaatctctttttgatggcaagaacgtcgtaattcctctgtcgatctcatgtaattaccaaactcatctacttattactttctttatatgcacttactgatgcggccgcttaattaagatgagtgatactcaggactcaggactcactctgctgatcactagtgctagcctcgaggtcgacacaactttgtatacaaaagttgtctagacctagctaggctcagcaactcatccagtcaagttcgagtcagtgagttgggcggccgcagcttatagtaaagatttttttgttaataaaatgaaagttaatatttatggatttatttgaacatatttacaagtttttgttaataaatttatttacagaagtgttaaatttgaaaatgtgttaaatgagagttaatatttatggatataatattactttatttaaaaataaaatgaatttatattaaaatatgatttggtaaaagatattataaagaggaacttggatgagaaagacgacgatgggcaaaagttgcatggcacaccgcttttgttcagtaacatctgcactgtggcgcctttttcacactcaccatgcatgctgccacgtcagctttcacactatgacaccactggccatacacgttgccacctcagctttctcctcttctcactatgacacgactggccatgcatgcatgcatgctgccacctcagctcccgcctcttcacccgtgtctttctctcatgtcgcagtgctgcgtgccaacctcttctctctataaatagagagaagagaatgatggttaaactcaaaccaaaacaagaaaacatacacaaatagcaaaacggatccacaaccaaaaatggccgctcgcaacgtgtctgcagcgcatgagatgcacgatgaaaagcgcatcgccgtcgtcggcatggccgtccagtacgccggatgcaaaaccaaggacgagttctgggaggtgctcatgaacggcaaggtcgagtccaaggtgatcagcgacaaacgactcggctccaactaccgcgccgagcactacaaagcagagcgcagcaagtatgccgacaccttttgcaacgaaacgtacggcacccttgacgagaacgagatcgacaacgagcacgaactcctcctcaacctcgccaagcaggcactcgcagagacatccgtcaaagactcgacacgctgcggcatcgtcagcggctgcctctcgttccccatggacaacctccagggtgaactcctcaacgtgtaccaaaaccatgtcgagaaaaagctcggggcccgcgtcttcaaggacgcctcccattggtccgaacgcgagcagtccaacaaacccgaggccggtgaccgccgcatcttcatggacccggcctccttcgtcgccgaagaactcaacctcggcgcccttcactactccgtcgacgcagcatgcgccacggcgctctacgtgctccgcctcgcgcaggatcatctcgtctccggcgccgccgacgtcatgctctgcggtgccacctgcctgccggagccctttttcatcctttcgggcttttccaccttccaggccatgcccgtcggcacgggccagaacgtgtccatgccgctgcacaaggacagccagggcctcaccccgggtgagggcggctccatcatggtcctcaagcgtctcgatgatgccatccgcgacggcgaccacatctacggcacccttctcggcgccaatgtcagcaactccggcacaggtctgcccctcaagccccttctccccagcgagaaaaagtgcctcatggacacctacacgcgcattaacgtgcacccgcacaagattcagtacgtcgagtgccacgccaccggcacgccccagggtgatcgtgtggaaatcgacgccgtcaaggcctgctttgaaggcaaggtcccccgtttcggtaccacaaagggcaactttggacacaccctcgtcgcagccggctttgccggtatgtgcaaggtcctcctctccatgaagcatggcatcatcccgcccaccccgggtatcgatgacgagaccaagatggaccctctcgtcgtctccggtgaggccatcccatggccagagaccaacggcgagcccaagcgcgccggtctctcggcctttggctttggtggcaccaacgcccatgccgtctttgaggagcatgacccctccaacgccgcctgcacgggccacgactccatttctgcgctctcggcccgctgcggcggtgaaagcaacatgcgcatcgccatcactggtatggacgccacctttggcgctctcaagggactcgacgccttcgagcgcgccatttacaccggcgctcacggtgccatcccactcccagaaaagcgctggcgctttctcggcaaggacaaggactttcttgacctctgcggcgtcaaggccaccccgcacggctgctacattgaagatgttgaggtcgacttccagcgcctccgcacgcccatgacccctgaagacatgctcctccctcagcagcttctggccgtcaccaccattgaccgcgccatcctcgactcgggaatgaaaaagggtggcaatgtcgccgtctttgtcggcctcggcaccgacctcgagctctaccgtcaccgtgctcgcgtcgctctcaaggagcgcgtccgccctgaagcctccaagaagctcaatgacatgatgcagtacattaacgactgcggcacatccacatcgtacacctcgtacattggcaacctcgtcgccacgcgcgtctcgtcgcagtggggcttcacgggcccctcctttacgatcaccgagggcaacaactccgtctaccgctgcgccgagctcggcaagtacctcctcgagaccggcgaggtcgatggcgtcgtcgttgcgggtgtcgatctctgcggcagtgccgaaaacctttacgtcaagtctcgccgcttcaaggtgtccacctccgataccccgcgcgccagctttgacgccgccgccgatggctactttgtcggcgagggctgcggtgcctttgtgctcaagcgtgagactagctgcaccaaggacgaccgtatctacgcttgcatggatgccatcgtccctggcaacgtccctagcgcctgcttgcgcgaggccctcgaccaggcgcgcgtcaagccgggcgatatcgagatgctcgagctcagcgccgactccgcccgccacctcaaggacccgtccgtcctgcccaaggagctcactgccgaggaggaaatcggcggccttcagacgatccttcgtgacgatgacaagctcccgcgcaacgtcgcaacgggcagtgtcaaggccaccgtcggtgacaccggttatgcctctggtgctgccagcctcatcaaggctgcgctttgcatctacaaccgctacctgcccagcaacggcgacgactgggatgaacccgcccctgaggcgccctgggacagcaccctctttgcgtgccagacctcgcgcgcttggctcaagaaccctggcgagcgtcgctatgcggccgtctcgggcgtctccgagacgcgctcgtgctattccgtgctcctctccgaagccgagggccactacgagcgcgagaaccgcatctcgctcgacgaggaggcgcccaagctcattgtgcttcgcgccgactcccacgaggagatccttggtcgcctcgacaagatccgcgagcgcttcttgcagcccacgggcgccgccccgcgcgagtccgagctcaaggcgcaggcccgccgcatcttcctcgagctcctcggcgagacccttgcccaggatgccgcttcttcaggctcgcaaaagcccctcgctctcagcctcgtctccacgccctccaagctccagcgcgaggtcgagctcgcggccaagggtatcccgcgctgcctcaagatgcgccgcgattggagctcccctgctggcagccgctacgcgcctgagccgctcgccagcgaccgcgtcgccttcatgtacggcgaaggtcgcagcccttactacggcatcacccaagacattcaccgcatttggcccgaactccacgaggtcatcaacgaaaagacgaaccgtctctgggccgaaggcgaccgctgggtcatgccgcgcgccagcttcaagtcggagctcgagagccagcagcaagagtttgatcgcaacatgattgaaatgttccgtcttggaatcctcacctcaattgccttcaccaatctggcgcgcgacgttctcaacatcacgcccaaggccgcctttggcctcagtcttggcgagatttccatgatttttgccttttccaagaagaacggtctcatctccgaccagctcaccaaggatcttcgcgagtccgacgtgtggaacaaggctctggccgttgaatttaatgcgctgcgcgaggcctggggcattccacagagtgtccccaaggacgagttctggcaaggctacattgtgcgcggcaccaagcaggatatcgaggcggccatcgccccggacagcaagtacgtgcgcctcaccatcatcaatgatgccaacaccgccctcattagcggcaagcccgacgcctgcaaggctgcgatcgcgcgtctcggtggcaacattcctgcgcttcccgtgacccagggcatgtgcggccactgccccgaggtgggaccttataccaaggatatcgccaagatccatgccaaccttgagttccccgttgtcgacggccttgacctctggaccacaatcaaccagaagcgcctcgtgccacgcgccacgggcgccaaggacgaatgggccccttcttcctttggcgagtacgccggccagctctacgagaagcaggctaacttcccccaaatcgtcgagaccatttacaagcaaaactacgacgtctttgtcgaggttgggcccaacaaccaccgtagcaccgcagtgcgcaccacgcttggtccccagcgcaaccaccttgctggcgccatcgacaagcagaacgaggatgcttggacgaccatcgtcaagcttgtggcttcgctcaaggcccaccttgttcctggcgtcacgatctcgccgctgtaccactccaagcttgtggcggaggctgaggcttgctacgctgcgctctgcaagggtgaaaagcccaagaagaacaagtttgtgcgcaagattcagctcaacggtcgcttcaacagcaaggcggaccccatctcctcggccgatcttgccagctttccgcctgcggaccctgccattgaagccgccatctcgagccgcatcatgaagccggttgctccgaagttctacgcgcgtctcaacattgacgagcaggacgagacccgtgatccgatcctcaacaaggacaacgcgccgtcttccagctctagctcctcttccagctcttccagctcttccagcccgtcgccagctccgtccgccccagtgcaaaagaaggctgctccggccgcggagaccaaggctgttgcttcggctgacgcacttcgcagtgccctgctcgatctcgacagtatgcttgcgctgagctctgccagtgcctccggcaaccttgttgagactgcgcctagcgacgcctcggtcattgtgccgccctgcaacattgcggatctcggcagccgcgccttcatgaaaacgtacggtgtttcggcgcctctgtacacgggcgccatggccaagggcattgcctctgcggacctcgtcattgccgccggccgccagggcatccttgcgtcctttggcgccggcggacttcccatgcaggttgtgcgtgagtccatcgaaaagattcaggccgccctgcccaatggcccgtacgctgtcaaccttatccattctccctttgacagcaacctcgaaaagggcaatgtcgatctcttcctcgagaagggtgtcacctttgtcgaggcctcggcctttatgacgctcaccccgcaggtcgtgcggtaccgcgcggctggcctcacgcgcaacgccgacggctcggtcaacatccgcaaccgtatcattggcaaggtctcgcgcaccgagctcgccgagatgttcatgcgtcctgcgcccgagcaccttcttcagaagctcattgcttccggcgagatcaaccaggagcaggccgagctcgcccgccgtgttcccgtcgctgacgacatcgcggtcgaagctgactcgggtggccacaccgacaaccgccccatccacgtcattctgcccctcatcatcaaccttcgcgaccgccttcaccgcgagtgcggctacccggccaaccttcgcgtccgtgtgggcgccggcggtggcattgggtgcccccaggcggcgctggccaccttcaacatgggtgcctcctttattgtcaccggcaccgtgaaccaggtcgccaagcagtcgggcacgtgcgacaatgtgcgcaagcagctcgcgaaggccacttactcggacgtatgcatggccccggctgccgacatgttcgaggaaggcgtcaagcttcaggtcctcaagaagggaaccatgtttccctcgcgcgccaacaagctctacgagctcttttgcaagtacgactcgttcgagtccatgccccccgcagagcttgcgcgcgtcgagaagcgcatcttcagccgcgcgctcgaagaggtctgggacgagaccaaaaacttttacattaaccgtcttcacaacccggagaagatccagcgcgccgagcgcgaccccaagctcaagatgtcgctgtgctttcgctggtacctgagcctggcgagccgctgggccaacactggagcttccgatcgcgtcatggactaccaggtctggtgcggtcctgccattggttccttcaacgatttcatcaagggaacttaccttgatccggccgtcgcaaacgagtacccgtgcgtcgttcagattaacaagcagatccttcgtggagcgtgcttcttgcgccgtctcgaaattctgcgcaacgcacgcctttccgatggcgctgccgctcttgtggccagcatcgatgacacatacgtcccggccgagaagctgtaagcggccgcatttaaatggatccactaggccatggtgacttaaggtagttagcttaatcacttaggtcacccagtccaagcccggcctagcacgatgatcatgagtgttgctattgatgtatgttaatactatacacagtcatcgtgtgtgttttataaaactgtaagcttaggatgtttgaggctaatgtaattagcactacaccgtaataaatgagaggtttactttatgttttaataatgttcttacccttgctgctctctaaactgtaatggcgtacggttagctaaactaaagtaaaaatcgattcgcttgagtaaaattagtgaccgggaaagatcatcgactactactgctcagagatgtaatcggtaattaagacttcaagctcaataattaattaggagtaaatctggcttcgaatttttaaattgtcaacttccaaagaaggattggcaagactcaatctcaattgcccaacaaacatatggctctttacaaatttggaatctctttttgatggcaagaacgtcgtaattcctctgtcgatctcatgtaattaccaaactcatctacttattactttctttatatgcacttactgatgcggccgcttaattaatctgacctgaccactagacctgagtgagtacagatgtgctactagtgctagcctcgaggtcgaccaacttttctatacaaagttgtctagacctagctaggactaggcactgagtgactcactgacctgactgagtgactggcggccgcagcttatagtaaagatttttttgttaataaaatgaaagttaatatttatggatttatttgaacatatttacaagtttttgttaataaatttatttacagaagtgttaaatttgaaaatgtgttaaatgagagttaatatttatggatataatattactttatttaaaaataaaatgaatttatattaaaatatgatttggtaaaagatattataaagaggaacttggatgagaaagacgacgatgggcaaaagttgcatggcacaccgcttttgttcagtaacatctgcactgtggcgcctttttcacactcaccatgcatgctgccacgtcagctttcacactatgacaccactggccatacacgttgccacctcagctttctcctcttctcactatgacacgactggccatgcatgcatgcatgctgccacctcagctcccgcctcttcacccgtgtctttctctcatgtcgcagtgctgcgtgccaacctcttctctctataaatagagagaagagaatgatggttaaactcaaaccaaaacaagaaaacatacacaaatagcaaaacggatccacaaccaaaacatatggcgctccgtgtcaagacgaacaagaagccatgctgggagatgaccaaggaggagctgaccagcggcaagaccgaggtgttcaactatgaggaactcctcgagttcgcagagggcgacatcgccaaggtcttcggacccgagttcgccgtcatcgacaagtacccgcgccgcgtgcgcctgcccgcccgcgagtacctgctcgtgacccgcgtcaccctcatggacgccgaggtcaacaactaccgcgtcggcgcccgcatggtcaccgagtacgatctccccgtcaacggagagctctccgagggcggagactgcccctgggccgtcctggtcgagagtggccagtgcgatctcatgctcatctcctacatgggcattgacttccagaaccagggcgaccgcgtctaccgcctgctcaacaccacgctcaccttttacggcgtggcccacgagggcgagaccctcgagtacgacattcgcgtcaccggcttcgccaagcgtctcgacggcggcatctccatgttcttcttcgagtacgactgctacgtcaacggccgcctcctcatcgagatgcgcgatggctgcgccggcttcttcaccaacgaggagctcgacgccggcaagggcgtcgtcttcacccgcggcgacctcgccgcccgcgccaagatcccaaagcaggacgtctccccctacgccgtcgccccctgcctccacaagaccaagctcaacgaaaaggagatgcagaccctcgtcgacaaggactgggcatccgtctttggctccaagaacggcatgccggaaatcaactacaaactctgcgcgcgtaagatgctcatgattgaccgcgtcaccagcattgaccacaagggcggtgtctacggcctcggtcagctcgtcggtgaaaagatcctcgagcgcgaccactggtactttccctgccactttgtcaaggatcaggtcatggccggatccctcgtctccgacggctgcagccagatgctcaagatgtacatgatctggctcggcctccacctcaccaccggaccctttgacttccgcccggtcaacggccaccccaacaaggtccgctgccgcggccaaatctccccgcacaagggcaagctcgtctacgtcatggagatcaaggagatgggcttcgacgaggacaacgacccgtacgccattgccgacgtcaacatcattgatgtcgacttcgaaaagggccaggactttagcctcgaccgcatcagcgactacggcaagggcgacctcaacaagaagatcgtcgtcgactttaagggcatcgctctcaagatgcagaagcgctccaccaacaagaacccctccaaggttcagcccgtctttgccaacggcgccgccactgtcggccccgaggcctccaaggcttcctccggcgccagcgccagcgccagcgccgccccggccaagcctgccttcagcgccgatgttcttgcgcccaagcccgttgcccttcccgagcacatcctcaagggcgacgccctcgcccccaaggagatgtcctggcaccccatggcccgcatcccgggcaacccgacgccctcttttgcgccctcggcctacaagccgcgcaacatcgcctttacgcccttccccggcaaccccaacgataacgaccacaccccgggcaagatgccgctcacctggttcaacatggccgagttcatggccggcaaggtcagcatgtgcctcggccccgagttcgccaagttcgacgactcgaacaccagccgcagccccgcttgggacctcgctctcgtcacccgcgccgtgtctgtgtctgacctcaagcacgtcaactaccgcaacatcgacctcgacccctccaagggtaccatggtcggcgagttcgactgccccgcggacgcctggttctacaagggcgcctgcaacgatgcccacatgccgtactcgatcctcatggagatcgccctccagacctcgggtgtgctcacctcggtgctcaaggcgcccctgaccatggagaaggacgacatcctcttccgcaacctcgacgccaacgccgagttcgtgcgcgccgacctcgactaccgcggcaagactatccgcaacgtcaccaagtgcactggctacagcatgctcggcgagatgggcgtccaccgcttcacctttgagctctacgtcgatgatgtgctcttttacaagggctcgacctcgttcggctggttcgtgcccgaggtctttgccgcccaggccggcctcgacaacggccgcaagtcggagccctggttcattgagaacaaggttccggcctcgcaggtctcctcctttgacgtgcgccccaacggcagcggccgcaccgccatcttcgccaacgcccccagcggcgcccagctcaaccgccgcacggaccagggccagtacctcgacgccgtcgacattgtctccggcagcggcaagaagagcctcggctacgcccacggttccaagacggtcaacccgaacgactggttcttctcgtgccacttttggtttgactcggtcatgcccggaagtctcggtgtcgagtccatgttccagctcgtcgaggccatcgccgcccacgaggatctcgctggcaagcacggcattgccaaccccacctttgtgcacgccccgggcaagatcagctggaagtaccgcggccagctcacgcccaagagcaagaagatggactcggaggtccacatcgtgtccgtggacgcccacgacggcgttgtcgacctcgtcgccgacggcttcctctgggccgacagcctccgcgtctactcggtgagcaacattcgcgtgcgcatcgcctccggtgaggcccctgccgccgcctcctccgccgcctctgtgggctcctcggcttcgtccgtcgagcgcacgcgctcgagccccgctgtcgcctccggcccggcccagaccatcgacctcaagcagctcaagaccgagctcctcgagctcgatgccccgctctacctctcgcaggacccgaccagcggccagctcaagaagcacaccgacgtggcctccggccaggccaccatcgtgcagccctgcacgctcggcgacctcggtgaccgctccttcatggagacctacggcgtcgtcgccccgctgtacacgggcgccatggccaagggcattgcctcggcggacctcgtcatcgccgccggcaagcgcaagatcctcggctcctttggcgccggcggcctccccatgcaccacgtgcgcgccgccctcgagaagatccaggccgccctgcctcagggcccctacgccgtcaacctcatccactcgccttttgacagcaacctcgagaagggcaacgtcgatctcttcctcgagaagggcgtcactgtggtggaggcctcggcattcatgaccctcaccccgcaggtcgtgcgctaccgcgccgccggcctctcgcgcaacgccgacggttcggtcaacatccgcaaccgcatcatcggcaaggtctcgcgcaccgagctcgccgagatgttcatccgcccggccccggagcacctcctcgagaagctcatcgcctcgggcgagatcacccaggagcaggccgagctcgcgcgccgcgttcccgtcgccgacgatatcgctgtcgaggctgactcgggcggccacaccgacaaccgccccatccacgtcatcctcccgctcatcatcaacctccgcaaccgcctgcaccgcgagtgcggctaccccgcgcacctccgcgtccgcgttggcgccggcggtggcgtcggctgcccgcaggccgccgccgccgcgctcaccatgggcgccgccttcatcgtcaccggcactgtcaaccaggtcgccaagcagtccggcacctgcgacaacgtgcgcaagcagctctcgcaggccacctactcggatatctgcatggccccggccgccgacatgttcgaggagggcgtcaagctccaggtcctcaagaagggaaccatgttcccctcgcgcgccaacaagctctacgagctcttttgcaagtacgactccttcgactccatgcctcctgccgagctcgagcgcatcgagaagcgtatcttcaagcgcgcactccaggaggtctgggaggagaccaaggacttttacattaacggtctcaagaacccggagaagatccagcgcgccgagcacgaccccaagctcaagatgtcgctctgcttccgctggtaccttggtcttgccagccgctgggccaacatgggcgccccggaccgcgtcatggactaccaggtctggtgtggcccggccattggcgccttcaacgacttcatcaagggcacctacctcgaccccgctgtctccaacgagtacccctgtgtcgtccagatcaacctgcaaatcctccgtggtgcctgctacctgcgccgtctcaacgccctgcgcaacgacccgcgcattgacctcgagaccgaggatgctgcctttgtctacgagcccaccaacgcgctctaagctagcatttaaatctaggccatggtgacttaaggtagttagcttaatcacttaggtcacccagtccaagcccggcctagcacgatgatcatgagtgttgctattgatgtatgttaatactatacacagtcatcgtgtgtgttttataaaactgtaagcttaggatgtttgaggctaatgtaattagcactacaccgtaataaatgagaggtttactttatgttttaataatgttcttacccttgctgctctctaaactgtaatggcgtacggttagctaaactaaagtaaaaatcgattcgcttgagtaaaattagtgaccgggaaagatcatcgactactactgctcagagatgtaatcggtaattaagacttcaagctcaataattaattaggagtaaatctggcttcgaatttttaaattgtcaacttccaaagaaggattggcaagactcaatctcaattgcccaacaaacatatatggctctttacaaatttggaatctctttttgatggcaagaacgtcgtaattcctctgtcgatctcatgtaattaccaaactcatctacttattactttctttatatgcacttactgatgcggccgcttaattaatcacgagtggatgactgtcacgactgactcatgactgactactagtgctagcctcgaggtcgacacaactttgtataataaagttgtctagacctaggagctgtgctgggtaactcacatgagtcactggtcacatcagcggccgcagcttatagtaaagatttttttgttaataaaatgaaagttaatatttatggatttatttgaacatatttacaagtttttgttaataaatttatttacagaagtgttaaatttgaaaatgtgttaaatgagagttaatatttatggatataatattactttatttaaaaataaaatgaatttatattaaaatatgatttggtaaaagatattataaagaggaacttggatgagaaagacgacgatgggcaaaagttgcatggcacaccgcttttgttcagtaacatctgcactgtggcgcctttttcacactcaccatgcatgctgccacgtcagctttcacactatgacaccactggccatacacgttgccacctcagctttctcctcttctcactatgacacgactggccatgcatgcatgcatgctgccacctcagctcccgcctcttcacccgtgtctttctctcatgtcgcagtgctgcgtgccaacctcttctctctataaatagagagaagagaatgatggttaaactcaaaccaaaacaagaaaacatacacaaatagcaaaacggatccacaaccaaaaatgttgcagcatacttggctaccaaaacccccaaatttaaccttattgtcagatgaagttcatctctggcgcattccccttgaccaaccagaatcacagctacaggatttagccgctaccttatctagtgacgaattagcccgtgcaaacagattttattttcccgaacatcgccggcgttttactgctggtcgtggtattctccgcagtatcttggggggctatttgggtgtggaaccagggcaagttaaatttgattatgaatcccgtggtaaaccaatattaggcgatcgctttgccgagagtggtttattatttaacttgtcacactcccagaacttggccttgtgtgcagtcaattacacgcgccaaatcggcatcgatttagaatatctccgccccacatctgatttagaatcccttgccaaaaggttctttttaccgcgagaatatgaattattgcgatcgctacccgatgagcaaaaacaaaaaattttctttcgttactggacttgtaaagaggcttatcttaaagcaacgggtgacggcatcgctaaattagaggaaattgaaatagcactaactcccacagaaccagctaagttacagacagctccagcgtggagtctcctagagctagtgccagatgataattgtgttgctgctgttgccgtggcgggttttggctggcagccaaaattctggcattattgagtagttagcttaatcacttaggtcacccagtccaagcccggcctagcacgatgatcatgagtgttgctattgatgtatgttaatactatacacagtcatcgtgtgtgttttataaaactgtaagcttaggatgtttgaggctaatgtaattagcactacaccgtaataaatgagaggtttactttatgttttaataatgttcttacccttgctgctctctaaactgtaatggcgtacggttagctaaactaaagtaaaaatcgattcgcttgagtaaaattagtgaccgggaaagatcatcgactactactgctcagagatgtaatcggtaattaagacttcaagctcaataattaattaggagtaaatctggcttcgaatttttaaattgtcaacttccaaagaaggattggcaagactcaatctcaattgcccaacaaacatatggctctttacaaatttggaatctctttttgatggcaagaacgtcgtaattcctctgtcgatctcatgtaattaccaaactcatctacttattactttctttatatgcacttactgatgcggccgcttaattaactactgtcactgaggccgtagacgagtacggactgatctaactagtgctagcctcgaggtcgacacccagctttc

SEQ ID NO: 41 - DNA, 35154 bp, Artificial sequence
  plasmid pDAB7369
ttgtacaaagtggttgcggccgcttaattaaatttaaattcaattaatgcaatcttgattttcaacaacgaaggtaatggcgtaaaagaaaaaatgtatgttattgtattgatctttcatgatgttgaagcgtgccataatatgatgatgtataattaaaatattaactgtcgcattttattgaaatggcactgttatttcaaccatatctttgattctgttacatgacacgactgcaagaagtaaataatagacgccgttgttaaagaattgctatcatatgtgcctaactagagggaatttgagcgtcagacctaatcaaatattacaaaatatctcactctgtcgccagcaatggtgtaatcagcgcagacaaatggcgtaaagatcgcggaaaaacctccccgagtggcatgatagctgcctctgtattgctgatttagtcagccttatttgacttaagggtgccctcgttagtgacaaattgctttcaaggagacagccatgccccacactttgttgaaaaacaaattgcctttggggagacggtaaagccagttgctcttcaataaggaatgtcgaggaggcaatgtaaccgcctctggtagtacacttctctaatccaaaaatcaatttgtattcaagataccgcaaaaaacttatggtttaaaccctgcaggactagtccagaaggtaattatccaagatgtagcatcaagaatccaatgtttacgggaaaaactatggaagtattatgtaagctcagcaagaagcagatcaatatgcggcacatatgcaacctatgttcaaaaatgaagaatgtacagatacaagatcctatactgccagaatacgaagaagaatacgtagaaattgaaaaagaagaaccaggcgaagaaaagaatcttgaagacgtaagcactgacgacaacaatgaaaagaagaagataaggtcggtgattgtgaaagagacatagaggacacatgtaaggtggaaaatgtaagggcggaaagtaaccttatcacaaaggaatcttatcccccactacttatccttttatatttttccgtgtcatttttgcccttgagttttcctatataaggaaccaagttcggcatttgtgaaaacaagaaaaaatttggtgtaagctattttctttgaagtactgaggatacaacttcagagaaatttgtaagtttgtaggtaccagatctggatcccaaaccatgtctccggagaggagaccagttgagattaggccagctacagcagctgatatggccgcggtttgtgatatcgttaaccattacattgagacgtctacagtgaactttaggacagagccacaaacaccacaagagtggattgatgatctagagaggttgcaagatagatacccttggttggttgctgaggttgagggtgttgtggctggtattgcttacgctgggccctggaaggctaggaacgcttacgattggacagttgagagtactgtttacgtgtcacataggcatcaaaggttgggcctaggatctacattgtacacacatttgcttaagtctatggaggcgcaaggttttaagtctgtggttgctgttataggccttccaaacgatccatctgttaggttgcatgaggctttgggatacacagcccggggtacattgcgcgcagctggatacaagcatggtggatggcatgatgttggtttttggcaaagggattttgagttgccagctcctccaaggccagttaggccagttacccaaatctgagtagttagcttaatcacctagagctcgatcggcggcaatagcttcttagcgccatcccgggttgatcctatctgtgttgaaatagttgcggtgggcaaggctctctttcagaaagacaggcggccaaaggaacccaaggtgaggtgggctatggctctcagttccttgtggaagcgcttggtctaaggtgcagaggtgttagcgggatgaagcaaaagtgtccgattgtaacaagatatgttgatcctacgtaaggatattaaagtatgtattcatcactaatataatcagtgtattccaatatgtactacgatttccaatgtctttattgtcgccgtatgtaatcggcgtcacaaaataatccccggtgactttcttttaatccaggatgaaataatatgttattataatttttgcgatttggtccgttataggaattgaagtgtgcttgaggtcggtcgccaccactcccatttcataattttacatgtatttgaaaaataaaaatttatggtattcaatttaaacacgtatacttgtaaagaatgatatcttgaaagaaatatagtttaaatatttattgataaaataacaagtcaggtattatagtccaagcaaaaacataaatttattgatgcaagtttaaattcagaaatatttcaataactgattatatcagctggtacattgccgtagatgaaagactgagtgcgatattatggtgtaatacataggaattcgtttaaacgatctgcgtctaattttcggtccaacttgcacaggaaagacgtcgaccgcggtagctcttgcccagcagactgggcttccagtcctttcgctcgatcgggtccaatgttgtcctcagctgtgaaccggaagcggacgaccaacagtggaagaactgaaaggaacgagccgtctataccttgatgatcggcctctggtgaagggtatcatcgcagccaagcaagctcatgaaaggctgatgggggaggtgtataattatgaggcccacggcgggcttattctttagggaggatctatctcgttgctcaagtgcatggcgcaaagcagttattggagtgcggattttcgttggcatattattcgccacgagttagcagacgaagagaccttcatgaacgtggccaaggccagagttaagcagatgttacgccctgctgcaggcctttctattatccaatagttggttgatctttggaaagagcctcggctgaggcccatactgaaagagatcgatggatatcgatatgccatgttgtttgctagccagaaccagatcacatccgatatgctattgcagcttgacgcagatatggaggataagttgattcatgggatcgctcaggagtagctcatccatgcacgccgacaagaacagaaattccgtcgagttaacgcagccgcttacgacggattcgaaggtcatccattcggaatgtattagtttgcaccagctccgcgtcacacctgtcttcatttgaataagatgttagcaattgtttttagctttgtcttgttgtggcagggcggcaagtgcttcagacatcattctgttttcaaattttatgctggagaacagcttcttaattcctttggaaataatagactgcgtcttaaaattcagatgtctggatatagatatgattgtaaaataacctatttaagtgtcatttagaacataagttttatgaatgttcttccattttcgtcatcgaacgaataagagtaaatacaccttttttaacattacaaataagttcttatacgttgtttatacaccgggaatcatttccattattttcgcgcaaaagtcacggatattcgtgaaagcgacataaactgcgaaatttgcggggagtgtcttgagtttgcctcgaggctagcgcatgcacatagacacacacatcatctcattgatgcttggtaataattgtcattagattgtttttatgcatagatgcactcgaaatcagccaattttagacaagtatcaaacggatgtgacttcagtacattaaaaacgtccgcaatgtgttattaagttgtctaagcgtcaatttgatttacaattgaatatatcctgccccagccagccaacagctcgatttacaattgaatatatcctgccggccggcccacgcgtgtcgaggaattctgatctggcccccatttggacgtgaatgtagacacgtcgaaataaagatttccgaattagaataatttgtttattgctttcgcctataaatacgacggatcgtaatttgtcgttttatcaaaatgtactttcattttataataacgctgcggacatctacatttttgaattgaaaaaaaattggtaattactctttctttttctccatattgaccatcatactcattgctgatccatgtagatttcccggacatgaagccatttacaattgaatatatcctgccgccgctgccgctttgcacccggtggagcttgcatgttggtttctacgcagaactgagccggttaggcagataatttccattgagaactgagccatgtgcaccttccccccaacacggtgagcgacggggcaacggagtgatccacatgggacttttaaacatcatccgtcggatggcgttgcgagagaagcagtcgatccgtgagatcagccgacgcaccgggcaggcgcgcaacacgatcgcaaagtatttgaacgcaggtacaatcgagccgacgttcacgcggaacgaccaagcaagcttggctgccatttttggggtgaggccgttcgcggccgaggggcgcagcccctggggggatgggaggcccgcgttagcgggccgggagggttcgagaagggggggcaccccccttcggcgtgcgcggtcacgcgcacagggcgcagccctggttaaaaacaaggtttataaatattggtttaaaagcaggttaaaagacaggttagcggtggccgaaaaacgggcggaaacccttgcaaatgctggattttctgcctgtggacagcccctcaaatgtcaataggtgcgcccctcatctgtcagcactctgcccctcaagtgtcaaggatcgcgcccctcatctgtcagtagtcgcgcccctcaagtgtcaataccgcagggcacttatccccaggcttgtccacatcatctgtgggaaactcgcgtaaaatcaggcgttttcgccgatttgcgaggctggccagctccacgtcgccggccgaaatcgagcctgcccctcatctgtcaacgccgcgccgggtgagtcggcccctcaagtgtcaacgtccgcccctcatctgtcagtgagggccaagttttccgcgaggtatccacaacgccggcggccgcggtgtctcgcacacggcttcgacggcgtttctggcgcgtttgcagggccatagacggccgccagcccagcggcgagggcaaccagcccggtgagcgtcggaaagggtcgacggatcttttccgctgcataaccctgcttcggggtcattatagcgattttttcggtatatccatcctttttcgcacgatatacaggattttgccaaagggttcgtgtagactttccttggtgtatccaacggcgtcagccgggcaggataggtgaagtaggcccacccgcgagcgggtgttccttcttcactgtcccttattcgcacctggcggtgctcaacgggaatcctgctctgcgaggctggccggctaccgccggcgtaacagatgagggcaagcggatggctgatgaaaccaagccaaccaggaagggcagcccacctatcaaggtgtactgccttccagacgaacgaagagcgattgaggaaaaggcggcggcggccggcatgagcctgtcggcctacctgctggccgtcggccagggctacaaaatcacgggcgtcgtggactatgagcacgtccgcgagctggcccgcatcaatggcgacctgggccgcctgggcggcctgctgaaactctggctcaccgacgacccgcgcacggcgcggttcggtgatgccacgatcctcgccctgctggcgaagatcgaagagaagcaggacgagcttggcaaggtcatgatgggcgtggtccgcccgagggcagagccatgacttttttagccgctaaaacggccggggggtgcgcgtgattgccaagcacgtccccatgcgctccatcaagaagagcgacttcgcggagctggtattcgtgcagggcaagattcggaataccaagtacgagaaggacggccagacggtctacgggaccgacttcattgccgataaggtggattatctggacaccaaggcaccaggcgggtcaaatcaggaataagggcacattgccccggcgtgagtcggggcaatcccgcaaggagggtgaatgaatcggacgtttgaccggaaggcatacaggcaagaactgatcgacgcggggttttccgccgaggatgccgaaaccatcgcaagccgcaccgtcatgcgtgcgccccgcgaaaccttccagtccgtcggctcgatggtccagcaagctacggccaagatcgagcgcgacagcgtgcaactggctccccctgccctgcccgcgccatcggccgccgtggagcgttcgcgtcgtctcgaacaggaggcggcaggtttggcgaagtcgatgaccatcgacacgcgaggaactatgacgaccaagaagcgaaaaaccgccggcgaggacctggcaaaacaggtcagcgaggccaagcaggccgcgttgctgaaacacacgaagcagcagatcaaggaaatgcagctttccttgttcgatattgcgccgtggccggacacgatgcgagcgatgccaaacgacacggcccgctctgccctgttcaccacgcgcaacaagaaaatcccgcgcgaggcgctgcaaaacaaggtcattttccacgtcaacaaggacgtgaagatcacctacaccggcgtcgagctgcgggccgacgatgacgaactggtgtggcagcaggtgttggagtacgcgaagcgcacccctatcggcgagccgatcaccttcacgttctacgagctttgccaggacctgggctggtcgatcaatggccggtattacacgaaggccgaggaatgcctgtcgcgcctacaggcgacggcgatgggcttcacgtccgaccgcgttgggcacctggaatcggtgtcgctgctgcaccgcttccgcgtcctggaccgtggcaagaaaacgtcccgttgccaggtcctgatcgacgaggaaatcgtcgtgctgtttgctggcgaccactacacgaaattcatatgggagaagtaccgcaagctgtcgccgacggcccgacggatgttcgactatttcagctcgcaccgggagccgtacccgctcaagctggaaaccttccgcctcatgtgcggatcggattccacccgcgtgaagaagtggcgcgagcaggtcggcgaagcctgcgaagagttgcgaggcagcggcctggtggaacacgcctgggtcaatgatgacctggtgcattgcaaacgctagggccttgtggggtcagttccggctgggggttcagcagccagcgctttactggcatttcaggaacaagcgggcactgctcgacgcacttgcttcgctcagtatcgctcgggacgcacggcgcgctctacgaactgccgataaacagaggattaaaattgacaattgtgattaaggctcagattcgacggcttggagcggccgacgtgcaggatttccgcgagatccgattgtcggccctgaagaaagctccagagatgttcgggtccgtttacgagcacgaggagaaaaagcccatggaggcgttcgctgaacggttgcgagatgccgtggcattcggcgcctacatcgacggcgagatcattgggctgtcggtcttcaaacaggaggacggccccaaggacgctcacaaggcgcatctgtccggcgttttcgtggagcccgaacagcgaggccgaggggtcgccggtatgctgctgcgggcgttgccggcgggtttattgctcgtgatgatcgtccgacagattccaacgggaatctggtggatgcgcatcttcatcctcggcgcacttaatatttcgctattctggagcttgttgtttatttcggtctaccgcctgccgggcggggtcgcggcgacggtaggcgctgtgcagccgctgatggtcgtgttcatctctgccgctctgctaggtagcccgatacgattgatggcggtcctgggggctatttgcggaactgcgggcgtggcgctgttggtgttgacaccaaacgcagcgctagatcctgtcggcgtcgcagcgggcctggcgggggcggtttccatggcgttcggaaccgtgctgacccgcaagtggcaacctcccgtgcctctgctcacctttaccgcctggcaactggcggccggaggacttctgctcgttccagtagctttagtgtttgatccgccaatcccgatgcctacaggaaccaatgttctcggcctggcgtggctcggcctgatcggagcgggtttaacctacttcctttggttccgggggatctcgcgactcgaacctacagttgtttccttactgggctttctcagcccccgagcgcttagtgggaatttgtaccccttatcgaaccgggagcacaggatgacgcctaacaattcattcaagccgacaccgcttcgcggcgcggcttaattcaggagttaaacatcatgagggaagcggtgatcgccgaagtatcgactcaactatcagaggtagttggcgtcatcgagcgccatctcgaaccgacgttgctggccgtacatttgtacggctccgcagtggatggcggcctgaagccacacagtgatattgatttgctggttacggtgaccgtaaggcttgatgaaacaacgcggcgagctttgatcaacgaccttttggaaacttcggcttcccctggagagagcgagattctccgcgctgtagaagtcaccattgttgtgcacgacgacatcattccgtggcgttatccagctaagcgcgaactgcaatttggagaatggcagcgcaatgacattcttgcaggtatcttcgagccagccacgatcgacattgatctggctatcttgctgacaaaagcaagagaacatagcgttgccttggtaggtccagcggcggaggaactctttgatccggttcctgaacaggatctatttgaggcgctaaatgaaaccttaacgctatggaactcgccgcccgactgggctggcgatgagcgaaatgtagtgcttacgttgtcccgcatttggtacagcgcagtaaccggcaaaatcgcgccgaaggatgtcgctgccgactgggcaatggagcgcctgccggcccagtatcagcccgtcatacttgaagctaggcaggcttatcttggacaagaagatcgcttggcctcgcgcgcagatcagttggaagaatttgttcactacgtgaaaggcgagatcaccaaggtagtcggcaaataatgtctaacaattcgttcaagccgacgccgcttcgcggcgcggcttaactcaagcgttagagagctggggaagactatgcgcgatctgttgaaggtggttctaagcctcgtcttgcgatggcatttcgatccattcccattccgcgctcaagatggcttcccctcggcagttcatcagggctaaatcaatctagccgacttgtccggtgaaatgggctgcactccaacagaaacaatcaaacaaacatacacagcgacttattcacacgagctcaaattacaacggtatatatcctgccagtcagcatcatcacaccaaaagttaggcccgaatagtttgaaattagaaagctcgcaattgaggtctacaggccaaattcgctcttagccgtacaatattactcaccggatcctaaccggtttaattaaggcgcgccatgcccgggcaagcggccgcacaagtttgtacaaaaaagcaggcttctagacctaggtggagtcatcacgcagactatctcagcatgtgcgtagcacgcggccgcagcttatagtaaagatttttttgttaataaaatgaaagttaatatttatggatttatttgaacatatttacaagtttttgttaataaatttatttacagaagtgttaaatttgaaaatgtgttaaatgagagttaatatttatggatataatattactttatttaaaaataaaatgaatttatattaaaatatgatttggtaaaagatattataaagaggaacttggatgagaaagacgacgatgggcaaaagttgcatggcacaccgcttttgttcagtaacatctgcactgtggcgcctttttcacactcaccatgcatgctgccacgtcagctttcacactatgacaccactggccatacacgttgccacctcagctttctcctcttctcactatgacacgactggccatgcatgcatgcatgctgccacctcagctcccgcctcttcacccgtgtctttctctcatgtcgcagtgctgcgtgccaacctcttctctctataaatagagagaagagaatgatggttaaactcaaaccaaaacaagaaaacatacacaaatagcaaaacggatccacaaccaaaaatggcagcgaggctgcaagagcagaaaggaggtgagatggacacgaggattgcgatcataggcatgagcgccatacttccttgtggaaccacggtgagagagtcatgggagaccataagggctggcattgattgcctgtctgatcttcctgaggatcgtgttgatgtgactgcgtactttgacccagtcaagaccacaaaggacaaaatctactgcaagagaggaggtttcattcctgagtatgactttgatgcgcgtgagtttggtctcaacatgttccagatggaagattctgatgcgaatcagaccatctcacttctcaaggtcaaagaagcacttcaagatgctgggattgatgcacttggaaaggagaagaaaaacataggatgcgtgcttggcattggaggtggacagaagagttcacatgagttctacagcagactcaactatgtggttgtggagaaagtcttgagaaagatggggatgccagaggaagatgtcaaagtggctgtggagaagtacaaagcgaacttcccagaatggagacttgactctttccctggattccttgggaatgtcactgctggcagatgcaccaacacattcaacttggatggcatgaactgcgttgtggatgctgcatgtgcaagctccttgatagcagtcaaggttgcgattgatgaactgctctatggtgactgcgacatgatggtcactggtgcaacctgcacagacaactccattgggatgtacatggctttctcaaagacacctgtgttcagcacggacccaagtgtgagagcgtatgatgagaaaacgaaagggatgctcattggtgagggatcagccatgttggtgctcaaacgttatgcagatgcagtgagggatggtgatgagattcatgctgtgattcgtggttgtgcaagctcaagtgatggcaaagcagctggcatctacactcccacaatcagtggtcaagaggaagccttgagacgtgcatacaatcgtgcctgcgttgaccctgccactgtcactttggttgagggtcatgggactggcactccagttggagataggattgagttgactgcgttgaggaacttgtttgacaaagcgtatggtgaagggaacacagagaaagttgcagttggaagtatcaagtccagtattggtcatttgaaggctgttgctggtcttgctggaatgatcaaggtcatcatggctctcaaacacaagactttgcctggaacgatcaatgtggacaatccacccaatctctatgacaacactcccatcaatgagtcatccctctacatcaacacgatgaacagaccctggttccctccacctggtgttccgagacgtgctggaatatccagctttggctttggaggtgccaactaccatgcagtgttggaagaggctgaaccagagcacacgacagcgtacagactcaacaaacgtccacaaccggtgttgatgatggctgcaactcctgctgcgttgcagagcctttgtgaagctcagctgaaagagtttgaagctgcgatcaaggagaatgagacagtcaagaatactgcctacatcaagtgtgtcaagtttggagaacagttcaagttccctgggagcatacctgcgaccaatgcgagactgggattcttggtcaaagatgcggaggatgcgtgctccacgcttcgtgctatatgtgctcagtttgccaaagatgtgaccaaagaagcgtggaggcttccgagagaaggagtttctttccgtgccaaaggcattgccaccaatggtgctgttgctgcactcttctctggacaaggtgctcagtacacacacatgttcagtgaagttgcgatgaactggcctcagttcagacagtccattgctgcaatggacgctgcacagtccaaggttgctggaagtgacaaagactttgaaagagtctctcaagtcctgtacccaaggaaaccgtacgaacgtgagccagaacaagatcacaagaaaatctcactcacagcatacagccagccgtcaaccctggcatgtgctcttggtgcctttgagattttcaaggaagctggattcactccagactttgcagctggacacagcttgggtgagtttgctgcgctctatgcagctggttgtgttgacagagatgagttgtttgaacttgtttgcagaagggcaaggatcatgggaggcaaagatgcacctgccacacccaaaggttgcatggcagctgtcataggacccaacgcagagaacatcaaggttcaagctgccaacgtctggcttggaaactcaaactctccgtctcagactgtcattactgggtctgttgaagggattcaagctgaaagtgccagattgcagaaggaagggttcagagttgtgcctcttgcttgtgagtctgccttccattctccacagatggaaaatgccagctcagctttcaaagatgtcatatccaaggtttccttccgtacacccaaagcagaaacaaagctcttcagcaatgtttctggagagacctatccgacggatgccagagagatgctcactcaacacatgacctcatctgtgaagttcctgacccaagtgaggaacatgcaccaagctggtgcgagaatctttgttgagtttggaccgaaacaagttctcagcaaacttgtttctgaaaccctcaaagatgacccgtctgttgtcacagtgtctgtgaacccagcttctggcacggactctgacatacagttgagggatgctgcagttcagctggttgtggctggtgtcaatcttcaagggtttgacaagtgggatgctcctgatgccacgaggatgcaagccatcaagaaaaagagaaccacactcagactttcagctgccacctatgtcagtgacaagaccaagaaagtgagggatgctgccatgaacgacggaagatgtgtcacatacctcaagggtgctgcaccactcatcaaggctcctgaacctgtggttgacgaagctgccaagagggaggctgaaaggcttcagaaggagcttcaagacgctcagaggcagcttgacgacgccaaacgtgcagctgcagaagccaactccaaacttgctgctgccaaggaggaagccaagactgctgcagcttcagccaagcctgcagttgacactgctgttgtggagaaacatcgtgccatcctcaagtccatgctggctgagctggatggttatggaagtgttgatgcttcttcccttcagcaacagcaacagcaacagactgctccggcgcctgttaaagccgctgcccctgccgctcccgttgcaagtgctcctgctcccgccgtgtccaacgagttgcttgagaaagctgagacagttgtgatggaggttctcgctgccaagactggatacgaaacagacatgattgaggcggacatggagcttgagactgagttgggaattgacagcatcaagagggttgaaattctttctgaagtccaagctatgcttaacgttgaggcgaaagatgttgatgctctctctaggacgagaacagtgggtgaagttgtcaacgctatgaaggcagaaatcgctggttcttccgctccggcgccggcagctgccgcacctgcaccggctaaagcggctccagctgcagctgcaccagctgtttctaatgagctgctcgaaaaggcagaaactgttgtgatggaagtccttgctgccaaaactggctacgaaactgacatgatagaatcagacatggagcttgagacggagcttggaattgattccatcaagcgtgtggaaatcctcagtgaagtccaagccatgctcaatgtggaagctaaggatgtggatgctctctcaaggaccagaactgtcggtgaggttgtcaatgccatgaaggctgagatagctggaggctccgctcctgcgccggccgctgccgctcctggtcccgctgccgcggctccagctccagctgcagccgctccggccgtctcaaacgaactccttgaaaaagctgagaccgtcgtgatggaggtcttggcagctaaaaccggctatgagactgacatgattgagtctgacatggaattggagacagaacttgggatagacagcatcaaacgtgttgaaatcctcagtgaggtccaagctatgctgaacgtggaagcgaaggatgttgatgctctgtccagaacgaggaccgttggtgaggttgtggatgccatgaaggctgaaattgctggagggtctgcgcccgcgccagctgcagccgctcctgcacccgcagccgcggcacctgctccagctgcacctgcacctgccgtttcttcagaactcttggagaaggctgagacggttgtgatggaggttttggctgcaaagactggctatgagaccgacatgattgaatctgatatggaattggagacagagcttgggatcgattccatcaaaagagtggagatcctgagtgaagtccaagccatgctcaatgttgaagctaaggatgttgatgcactttcaagaacaaggacagtgggtgaggttgtggatgccatgaaggcggagattgctggagggagcgcgcctgcgccagctgccgcggcacctgcaccggcagccgcagctccagctccagctgcaccagcaccggccgcgcccgcgccagctgtttcatccgaactcctggaaaaggccgagacggttgtgatggaggtgctcgcagctaagactggttacgagaccgacatgattgaaagtgacatggagcttgaaaccgagttgggaatagatagcatcaaacgtgttgaaatcttgtctgaggtccaagctatgttgaacgtggaggcaaaagatgtcgatgcgctttcaagaaccagaacagtcggtgaggtcgtggacgccatgaaggctgaaattgccggaagctctgctagtgcgccagctgcagccgcacctgcacctgctgccgcggcacctgctccagctgcagccgctcctgccgtcagcaatgagttgctggagaaagccgaaacagttgtgatggaagtccttgctgcaaaaactggttacgaaacggacatgattgagtcagacatggaattggagaccgaacttggaatagattccatcaagagagtggagatcctctctgaggtgcaagccatgctcaacgttgaggctaaagatgttgatgcactcagtaggacaagaactgtgggggaagttgtcgatgcgatgaaggctgagattgctggaggctctgctcctgcgccggcagctgccgcacctgcacccgcagccgcggcaccagctgtcagcaacgaattgcttgagaaggctgaaacagttgtcatggaagtgctggctgcaaaaaccggctatgagactgacatgattgagtctgacatggaacttgagacggaattgggcattgacagcatcaagcgtgttgagatcctcagtgaagtccaagcaatgctcaatgtggaggctaaggatgtggatgccctctcaaggaccagaacagttggtgaggtcgttgatgcgatgaaggcggagatcgctggaagttccgcgcctgcgccagctgcagccgctcctgcacccgcagccgcggcaccggctccagctgcagccgcaccggccgtctcctcagaactcctggaaaaggctgagacagttgtgatggaagtccttgctgcgaaaactggctatgagaccgacatgattgaatctgacatggaactggagaccgagcttggaattgactccatcaaacgtgttgaaatcctctctgaggttcaagcgatgttgaatgtggaggccaaagatgttgatgctctttccagaacaaggacggtgggagaggtggttgatgccatgaaggctgagatagctgggggttctgctcctgcgccagctgcagccgctcctgctcccgctgccgcggcaccagctgtcagcaacgaactccttgaaaaagctgaaactgttgtgatggaggttttggctgcaaagactggatacgagactgacatgatagagtcagacatggagttggaaacagagcttgggattgatagcatcaagcgtgtggaaatcctttctgaggttcaagccatgctgaacgttgaggccaaagatgtcgatgctttgtcaaggaccagaacggttggagaagtggtcgatgccatgaaggctgagatagctggtggatcagcccctgctccggctgcagccgctcctgcaagtgccggtgctgcaccagctgtgaagattgattcagttcatggtgctgactgtgacgatttgtcactgatgcacgcaaaggtggttgacatcagaaggccagatgaactgattctggaaagaccggagaaccgtccagttcttgtcgttgacgatggctcagagttgacacttgctcttgtgagggtgttgggagcctgtgcagttgtcttgacctttgagggattgcagttggctcagagagctggtgcagctgccattcgtcatgttctggctaaggacctttcagcagaatcagctgagaaggccatcaaagaggctgagcaaagatttggagcgttgggaggcttcataagccagcaagcagaaaggtttgaaccagctgagatactgggtttcacactcatgtgtgcgaagtttgccaaagcctctctctgcactgctgtggctggaggtcgtcctgccttcatcggtgtggctaggcttgacggcagacttggattcacctctcaaggcacttctgacgcactcaagagagcacagcgtggagcgatctttggactctgcaagacaatagggttggagtggtcagaatctgatgtgttcagccgtggtgtggacattgctcaagggatgcacccagaagatgctgcagttgccatagttagggagatggcgtgtgctgacatcagaatcagagaggttgggattggagcaaaccagcaaagatgcacaatcagagctgccaagttggagactgggaaccctcagagacagatagcgaaagacgatgtgcttctggtttctggaggtgctcgtgggatcacacctctttgcatccgtgagatcacgcgtcagattgctggaggcaagtacattctgttgggtcgtagcaaagtttctgcgtctgaaccagcatggtgtgctggcatcactgatgagaaggctgtgcagaaagctgccacccaagagttgaagagggccttcagtgctggtgaaggacccaaacccactccaagggctgtcacgaaacttgtgggatctgttcttggtgctcgtgaagtgagaagctccattgctgccattgaagctctgggtggcaaagcgatctacagctcttgtgatgtgaactctgctgcagatgttgccaaagcagttagggatgcagagtcccagcttggtgccagagttagtggaatcgttcacgcttctggtgtgctccgtgatcgtctcatagagaagaaactccctgacgagtttgatgctgtctttgggaccaaagtcactgggttggagaatcttctggctgcagttgatcgtgccaacctcaaacacatggttctcttcagctcccttgctggtttccacggcaatgttggtcagtctgactatgcgatggcaaacgaagctctcaacaagatgggtttggaacttgcgaaggatgtcagtgtcaagtccatctgctttggtccctgggatggtgggatggtgacacctcaactcaagaaacagtttcaagaaatgggagttcagatcattcctcgtgaaggaggtgctgatacagttgcgaggattgtgttgggatcaagtcctgctgagatccttgttggaaactggaggacaccatccaagaaagttggaagtgacacgatcaccctgcatagaaagatcagtgccaagtccaatcccttcttggaggatcatgtcatacaaggcagaagggtgttgccaatgacccttgctattgggagccttgctgagacctgccttggactcttccctggctactctctctgggccatagatgacgcacagctcttcaaaggtgtcactgttgatggagacgtcaactgtgaagtgaccctcacaccgtccactgctccgagtgggagggtgaatgtccaagcgacgctcaagacgttctcaagtggaaaacttgttccagcctacagagctgtcatagtgttgtccaaccaaggtgctccacctgccaatgcaaccatgcagcctccgagccttgatgcagatcctgctttgcaagggtcagtctatgatggcaagactctctttcatggtcctgcgttcagaggcattgatgacgttctcagctgcaccaagagccagcttgttgccaagtgttctgctgttcctggatcagatgcagccagaggagagtttgcaactgacactgatgcacatgatccctttgtcaatgatcttgcctttcaagcaatgttggtctgggtgaggagaacgctgggacaagctgcactcccgaactccattcagaggatagtccaacacagaccggtcccacaagacaaacccttctacatcaccctcagatccaatcagagtggtggacatagccagcacaaacatgcacttcagttccacaacgaacaaggtgatctcttcattgatgttcaagcctctgtcattgcgacagactcacttgcgttctgagtagttagcttaatcacttaggtcacccagtccaagcccggcctagcacgatgatcatgagtgttgctattgatgtatgttaatactatacacagtcatcgtgtgtgttttataaaactgtaagcttaggatgtttgaggctaatgtaattagcactacaccgtaataaatgagaggtttactttatgttttaataatgttcttacccttgctgctctctaaactgtaatggcgtacggttagctaaactaaagtaaaaatcgattcgcttgagtaaaattagtgaccgggaaagatcatcgactactactgctcagagatgtaatcggtaattaagacttcaagctcaataattaattaggagtaaatctggcttcgaatttttaaattgtcaacttccaaagaaggattggcaagactcaatctcaattgcccaacaaacatatggctctttacaaatttggaatctctttttgatggcaagaacgtcgtaattcctctgtcgatctcatgtaattaccaaactcatctacttattactttctttatatgcacttactgatgcggccgcttaattaagatgagtgatactcaggactcaggactcactctgctgatcactagtgctagcctcgaggtcgacacaactttgtatacaaaagttgtctagacctaggctcagcaactcatccagtcaagttcgagtcagtgagttgggcggccgcagcttatagtaaagatttttttgttaataaaatgaaagttaatatttatggatttatttgaacatatttacaagtttttgttaataaatttatttacagaagtgttaaatttgaaaatgtgttaaatgagagttaatatttatggatataatattactttatttaaaaataaaatgaatttatattaaaatatgatttggtaaaagatattataaagaggaacttggatgagaaagacgacgatgggcaaaagttgcatggcacaccgcttttgttcagtaacatctgcactgtggcgcctttttcacactcaccatgcatgctgccacgtcagctttcacactatgacaccactggccatacacgttgccacctcagctttctcctcttctcactatgacacgactggccatgcatgcatgcatgctgccacctcagctcccgcctcttcacccgtgtctttctctcatgtcgcagtgctgcgtgccaacctcttctctctataaatagagagaagagaatgatggttaaactcaaaccaaaacaagaaaacatacacaaatagcaaaacggatccacaaccaaaaatggctgcaaggaacgtgagtgcggctcatgagatgcatgacgagaagaggatagctgttgtgggcatggctgttcagtatgctggatgcaaaacgaaagacgagttctgggaagttctcatgaatggaaaagttgagagcaaagtgatcagcgacaaacgtcttggttcaaattaccgtgctgaacactacaaagctgaaaggagcaagtatgctgacaccttctgcaatgagacatatggaactcttgatgagaacgaaatagacaatgagcatgaactccttttgaaccttgccaaacaagccttggctgaaacatctgtcaaagattcaacaagatgtggcatagtttctggatgcctcagcttcccgatggacaacctccaaggtgaactcttgaatgtgtaccagaaccatgttgagaagaaacttggtgccagagttttcaaagatgcctctcactggtcagaaagagaacagtccaacaaaccagaggctggtgacagaagaatcttcatggaccctgcttcctttgttgctgaggaactcaatcttggcgctctccactactctgttgatgctgcctgtgccactgcgctctatgtgctcagactggcgcaagatcacttggtctctggtgcagctgatgtgatgctttgtggtgcaacatgcctgccggagccgtttttcatactctctgggttctcaaccttccaagccatgcctgttggaacgggtcagaatgtgtccatgccgctgcacaaagattctcaaggattgacccctggtgaaggaggttccatcatggtcctcaaacgtttggatgacgcaatcagagatggagatcacatctatggaacacttttgggagccaatgtcagcaacagtggcactggtctgccacttaaaccccttttgccgtcagagaaaaagtgcctcatggacacctacacacgtatcaatgtgcatccccacaagattcagtatgttgaatgccatgcaactgggactccacaaggtgatcgtgtggaaattgatgctgtgaaggcttgctttgaaggcaaagtcccacgttttggaaccacaaaagggaactttggacacacattggtggcagctgggtttgctggcatgtgcaaagtgcttctctccatgaagcacgggatcattccacccactccgggaatagatgacgaaacgaagatggaccctctggttgtctctggtgaggccattccctggccagaaacgaatggagaaccgaagcgtgctggtctctcagcgtttggatttggtgggaccaatgctcatgctgtctttgaggaacatgacccaagcaatgctgcatgcactggccatgactccatttctgctctctctgcacgttgtggtggtgagtcaaacatgagaatagcaatcactgggatggatgccacttttggtgctttgaaaggattggatgcttttgaaagggccatctacactggtgctcatggtgctataccactcccagaaaagagatggagattcctggggaaagacaaggacttccttgatctttgtggagtcaaagcaacaccgcatggctgttacattgaagatgttgaagttgatttccagaggctgaggactccaatgactcctgaagatatgctcttgcctcaacagcttctggctgtcaccacaattgatagggccatattggactctggcatgaagaaaggtggaaatgtggctgtctttgtggggttggggaccgatcttgaactctaccgtcaccgtgcaagggttgctctcaaggagagagtgaggcctgaagccagcaagaaactcaatgacatgatgcagtacatcaatgattgtgggacaagcacttcttacaccagctacataggcaacttggttgcaacaagggtcagttcacaatggggcttcacgggaccttccttcacaatcacagaaggcaacaattctgtgtacagatgtgctgaacttggcaaatacctcttggaaacgggagaggttgatggggttgtggttgcgggtgttgatctctgtgggagtgctgagaacctttacgtcaagtcaaggcgtttcaaggtgtctacatctgacaccccgagagccagctttgatgcagctgctgatggttactttgttggagagggctgtggtgcatttgtgctcaagcgtgagacaagctgcaccaaggatgacagaatctatgcttgcatggatgccatagttcctggaaatgttccatctgcatgtttgagagaggcattggatcaagccagagtcaagcctggagacatcgagatgttggagctttctgctgattcagcgaggcatttgaaggacccgtctgttctcccaaaggaactcactgctgaggaagagattggcggacttcagacgattcttcgtgacgatgacaagctcccaaggaatgttgcaactggaagtgtcaaggccactgttggtgacactggttatgcttctggtgctgccagtttgattaaggctgcgctttgcatctacaaccgttacctgcccagcaatggagatgactgggatgaacctgcacctgaagcaccctgggacagcacactctttgcgtgccagacctcaagagcttggttgaagaaccctggtgagagacgttatgcggctgtttccggagtcagtgaaaccagaagttgctacagtgtgctgctttctgaagcagagggacactacgagagagagaacagaatcagtttggatgaggaagcacccaagctcattgtgttgagagcagactcccatgaagagattcttggaagattggacaagataagggaaaggttcttgcagcccacgggtgctgcacccagagagtctgaattgaaggcgcaagcccgtaggatctttcttgaactccttggtgagacccttgcccaagatgcagcttcatctggaagtcagaagccccttgctctcagcttggtctccactccatccaagctccagagagaggtggaacttgcggcaaaaggcattccgagatgtctcaagatgagacgtgattggagttcccctgctggaagcagatatgcgcctgagcctttggccagtgacagagttgccttcatgtatggagaaggaaggagcccttactatggcatcacacaagacattcataggatttggcctgaacttcatgaggtcatcaatgagaaaacaaaccgtctctgggctgaaggtgacagatgggtcatgccaagggccagcttcaagagtgagcttgagtcacaacagcaagagtttgacagaaacatgattgaaatgttccgtcttggaatcctcacctcaattgccttcacaaacctggcgagagatgttctcaacatcacgcccaaagcagcctttggactcagtttgggagagatttccatgatctttgctttctccaagaaaaacggtttgataagcgatcagttgacaaaggatttgagagagtcagatgtctggaacaaagctctggctgttgagttcaatgcgctcagagaagcctggggcattccacagtctgtcccaaaagatgagttctggcaaggttacatagtgaggggaacgaaacaagacatagaagcagccatagcaccagactcaaagtatgtgaggttgaccatcatcaatgatgccaacactgctctcatcagtggaaagcctgatgcatgcaaagctgcgattgctcgtcttggtggcaacatccctgcgcttccagtcactcaaggcatgtgtgggcattgcccagaggtgggaccttacaccaaggacatcgcaaagatccacgccaaccttgagttccctgtggttgatggtcttgatctctggactaccataaaccagaagaggcttgtgccaagagccacgggtgccaaagatgaatgggctccttcatcctttggggagtatgctggacagctctatgagaaacaagccaacttccctcagatagttgaaaccatctacaagcagaactatgatgtgtttgttgaagttgggccaaacaatcacagaagcacagcagtgagaaccacgcttggaccacagagaaaccaccttgctggtgccatagacaagcagaacgaggatgcttggacgacaatagtcaagctcgtggcttcattgaaggctcaccttgttcctggagtgaccatcagtccgctctaccactccaagctcgttgcagaggctgaggcttgttatgctgcgctctgtaaaggtgagaaacccaagaaaaacaagtttgtgagaaagattcagttgaatggcagattcaacagcaaggcagaccccatctcctcagcagaccttgcatccttcccacctgcggaccctgcgattgaagctgccatctcttcaaggatcatgaagcctgtggctccgaaattctatgcgcgtctcaacattgatgagcaagatgagaccagagatccgatcttgaacaaggacaatgcgccttccagctccagctcttccagcagttcctcttccagcagttcatctccgtctcctgctccttcagctccagttcagaagaaagctgccccagctgcggagacaaaagctgttgccagtgctgatgcacttcgtagtgccctgcttgatcttgactccatgcttgcgctcagctctgcaagtgcttctggcaaccttgttgagactgcgccatctgatgccagtgtcattgtccctccgtgcaacattgctgatcttggcagcagagctttcatgaaaacttatggtgtttctgcgcctctgtacaccggtgcaatggccaagggaattgcctctgcggacttggtgatcgcagctggaaggcaaggaatccttgcgtcatttggtgctggaggccttccaatgcaagttgtgcgtgagtccattgaaaagattcaagctgccctgcccaatggaccatatgctgtcaacctcatccattctccttttgacagcaaccttgagaagggaaatgttgatctcttcttggaaaagggtgtcacttttgttgaggcttcagccttcatgacgttgacaccgcaagttgtcagatacagagcggctgggttgacgaggaatgcagatgggtcagtcaacataaggaacagaatcattgggaaagtctccagaactgagctggctgaaatgttcatgcgtcctgcacctgagcatcttttgcagaagctcattgcttctggggagatcaatcaagaacaagctgagttggccagacgtgttcctgtggctgatgacattgcggttgaagctgattctggtggacacactgacaaccgtccaatccatgtcattctgcctctgattatcaacctgagggataggcttcacagagagtgtggatacccagcaaacctgagggttcgtgttggtgctgggggtggcattgggtgtccccaagctgcgctggcaactttcaacatgggtgcctctttcattgtcactggaacagtgaaccaagttgccaaacaatctgggacgtgtgacaatgtgaggaaacagcttgcgaaagcaacttactcagatgtttgcatggcaccggcagctgacatgtttgaggaaggtgtgaaacttcaagttttgaagaaaggaacaatgttcccttcaagagccaacaaactctatgagttgttctgcaagtatgattcttttgagtccatgcctccagcagagcttgcgagggttgagaaaagaatcttcagtcgtgcattggaagaggtctgggatgagaccaagaacttctacatcaaccgtctccacaacccagagaagatacagagggctgagagggaccccaaactgaagatgtcactgtgtttcagatggtatctgtccctggcttcaaggtgggccaacactggagcttctgacagagtcatggactaccaagtttggtgtggtcctgccattggttcattcaatgatttcatcaaaggaacttaccttgatccggcagtggcaaatgagtacccgtgtgttgtgcagatcaacaaacagattcttagaggagcgtgcttcttgaggcgtcttgaaatactgagaaatgcaaggctttcagatggtgcagctgcacttgtggcgagcattgatgacacatatgtccctgctgagaagctgtgagtagttagcttaatcacttaggtcacccagtccaagcccggcctagcacgatgatcatgagtgttgctattgatgtatgttaatactatacacagtcatcgtgtgtgttttataaaactgtaagcttaggatgtttgaggctaatgtaattagcactacaccgtaataaatgagaggtttactttatgttttaataatgttcttacccttgctgctctctaaactgtaatggcgtacggttagctaaactaaagtaaaaatcgattcgcttgagtaaaattagtgaccgggaaagatcatcgactactactgctcagagatgtaatcggtaattaagacttcaagctcaataattaattaggagtaaatctggcttcgaatttttaaattgtcaacttccaaagaaggattggcaagactcaatctcaattgcccaacaaacatatggctctttacaaatttggaatctctttttgatggcaagaacgtcgtaattcctctgtcgatctcatgtaattaccaaactcatctacttattactttctttatatgcacttactgatgcggccgcttaattaatctgacctgaccactagacctgagtgagtacagatgtgctactagtgctagcctcgaggtcgaccaacttttctatacaaagttgtctagacctaggactaggcactgagtgactcactgacctgactgagtgactggcggccgcagcttatagtaaagatttttttgttaataaaatgaaagttaatatttatggatttatttgaacatatttacaagtttttgttaataaatttatttacagaagtgttaaatttgaaaatgtgttaaatgagagttaatatttatggatataatattactttatttaaaaataaaatgaatttatattaaaatatgatttggtaaaagatattataaagaggaacttggatgagaaagacgacgatgggcaaaagttgcatggcacaccgcttttgttcagtaacatctgcactgtggcgcctttttcacactcaccatgcatgctgccacgtcagctttcacactatgacaccactggccatacacgttgccacctcagctttctcctcttctcactatgacacgactggccatgcatgcatgcatgctgccacctcagctcccgcctcttcacccgtgtctttctctcatgtcgcagtgctgcgtgccaacctcttctctctataaatagagagaagagaatgatggttaaactcaaaccaaaacaagaaaacatacacaaatagcaaaacggatccacaaccaaaaatggcgcttcgtgtcaagaccaacaagaagccatgttgggagatgaccaaggaggaactgacctctggcaaaactgaggtgttcaactatgaggaactcctggagtttgcagagggtgacatagctaaggtttttggtccggagtttgctgtcatagacaagtaccccagaagggtgaggctgcctgctcgtgaatacctgcttgtgacaagggtcacactcatggatgccgaggtcaacaactacagagttggtgccagaatggtcactgagtatgatcttccagtgaatggcgaattgtctgagggaggtgattgtccctgggcagttctggttgagagtggacagtgcgatttgatgctgatatcatacatgggaattgatttccagaaccaaggtgacagagtttaccgtctgctcaacaccacgttgacattctatggggttgcccatgagggagagacccttgagtatgacatcagagtgaccggttttgccaaacgtttggatggtggcatctccatgttcttctttgagtatgactgctatgtcaatgggaggcttctcattgagatgagagatggctgtgctggcttcttcacaaatgaggagcttgatgcgggaaagggtgtggtgttcacaagaggggatttggctgccagagctaagattccaaagcaagatgtttctccctatgctgtcgctccctgccttcacaaaacaaaactcaacgaaaaggagatgcagaccttggttgacaaagattgggcttccgtttttggctcaaagaatggcatgccggagatcaactacaaactctgcgcacgtaagatgctcatgattgatagagtcaccagcattgaccataagggaggtgtgtacggtttgggtcagttggttggtgagaaaatcttggagagggaccattggtacttcccatgccattttgttaaggatcaagtcatggctggatctcttgtcagcgacggttgttcacaaatgctcaagatgtacatgatctggctcggtttgcaccttaccaccggaccatttgacttcagacccgtcaacggacacccgaacaaagttaggtgtaggggtcagatatctcctcataagggaaagttggtctacgtcatggagatcaaagagatgggattcgacgaggataacgatccgtacgccattgctgacgtcaacatcattgacgttgatttcgaaaagggtcaagatttcagccttgatagaatcagcgactacggaaagggggatcttaacaaaaagatcgtcgtggacttcaagggcattgctctcaagatgcagaagagatccacgaacaagaacccctccaaagttcagcccgtttttgctaacggtgcagccactgtgggaccggaagcgtccaaggccagctctggtgccagtgctagtgcttctgctgcccctgcgaagcctgctttctcagcagatgttcttgcgccaaagccagttgcacttcctgaacatatcctcaagggtgacgctctcgctccgaaagaaatgtcctggcatcccatgtcaaaacttcctggcaacccgacgccgttcttctcccctagttcttaccctccgagggcaatttgcttcatccctttccctggcaacccacttgacaacaattgcaaagctggagaaatgcctctgaactggtacaacatgtcagagttcatgtgtggaaaagttagcaactgcttgggaccagagttcgcaagatttgataagtcaaatacgagcagaagccctgcttttgatttggctcttgtgactagagttgttgaagtcacaaacatggaacatggcaagttcctgaatgttgattgcaatcccagcaaaggcacaatggtgggggagtttgactgtcctcaagatgcgtggttctttgatggttcttgcaatgatgggcacatgccttattccatcatcatggaaatcggacttcagacatccggtgttctcaccagtgtgttgaaagcaccactgacgatggacaaagatgacattctctttaggaaccttgatgcaagtgctgaaatggtgaggccagatgtggatgtgagggggaaaaccataaggaatgtgaccaagtgcactggatatgcaatgttgggaaagatggggattcacagattcacgtttgagttgtctgttgatggcgtggttttctacaaaggaagcacttcctttggatggttcactccagaggtgtttgctcagcaagctggacttgacaatgggaaaaagacggagccttggtgcaaaactaacaacacgagtgtgagaagagttgaaatcgcatcagccaaaggcaaagaacagctgactgagaaacttccagatgcaactaatgctcaagttctcagaaggtcagaacagtgtgagtatttggattacctcaacattgctcctgattctgggctgcatgggaaaggatatgcgcatggacacaaagatgttaacccacaagactggttcttctcttgtcacttttggtttgatcctgtgatgcctggatctttgggaattgagtcaatgttccagctcattgaggcatttgcggtggaccagaacataccgggagaatacaatgtgagcaatccgacctttgcccatgcccctggaaaaacggcgtggaagtaccgtggtcaattgacaccaaagaaccgtgcgatggactgtgaggtgcacatagtttcaatcacagcctctcctgaaaatggaggctacgttgacatagtggcagatggagcactttgggttgatggtctccgtgtgtatgaagccaaagaactcagagttcgtgttgtcagtgcaaaacctcaagccattccggatgttcaacaacagccacccagcgcaaaagcggaccctgggaaaactggagttgcactcagtccgactcagttgagagatgtcctgcttgaagtggacaatccattgtatcttggtgttgaaaactccaatttggtgcagtttgaatccaaacctgcaacttcttcaaggattgtcagtatcaaaccatgctccataagtgatcttggtgacaagtccttcatggaaacgtacaatgtgtcagcacctctgtacactggagcaatggccaagggaattgcgtctgcggaccttgtcattgctgctgggaagaggaagatattgggttcttttggagcgggtgggcttccaatgcaccatgtgagggcagctttggagaagatacaagcggctctgcctcaaggaccatatgctgtgaacctcattcattcaccttttgacagcaacttggaaaaggggaatgttgatctcttcctcgaaaagggcgttactgtggtggaggcttctgcattcatgaccctcactccccaagttgttcgttaccgtgcagccggactctcaaggaacgctgatgggagtgtcaacatcagaaaccgtatcattggaaaagtgtccagaacagaactcgccgaaatgttcatcagaccggctccggaacacctccttgagaaactcatagcttctggtgagataacacaagaacaagccgaacttgcccgtcgtgttcctgtcgcagacgacatcgctgttgaagctgattctggtggtcacactgacaaccgtcccatccacgtcatcttgcctttgatcatcaaccttaggaacagactgcacagagagtgtggttatcctgcgcaccttagagtcagagttggagctggaggcggtgttggctgcccacaagctgctgcggctgccctcacaatgggagctgccttcatagtgactgggactgtcaatcaagttgctaaacagtccgggacatgtgacaacgtgagaaaacaactcagtcaagccacctacagtgacatttgcatggctccagcagctgatatgtttgaggaaggtgtgaaactccaagttctcaagaagggaacaatgttcccatcaagagctaacaaattgtacgaactcttttgcaagtacgactctttcgattcaatgcctcctgctgaacttgaaaggatcgagaagaggatcttcaagagggcacttcaagaggtctgggaagagaccaaggacttttacatcaatggtttgaagaatccagagaagatacagagagcggaacatgaccccaaactcaagatgtctttgtgtttcagatggtatcttggtcttgcatcacgttgggccaacatgggtgctcctgatcgtgtcatggactatcaagtctggtgtggtccagccattggagccttcaatgacttcatcaaaggaacatatcttgatcctgctgtctctaatgagtacccatgtgttgtccagatcaaccttcagattttgcgtggtgcatgttacctgaggcgtcttaatgctctgagaaatgatccgaggattgatcttgagactgaagatgctgcctttgtctatgagccaacgaatgcgctttgagtagttagcttaatcacttaggtcacccagtccaagcccggcctagcacgatgatcatgagtgttgctattgatgtatgttaatactatacacagtcatcgtgtgtgttttataaaactgtaagcttaggatgtttgaggctaatgtaattagcactacaccgtaataaatgagaggtttactttatgttttaataatgttcttacccttgctgctctctaaactgtaatggcgtacggttagctaaactaaagtaaaaatcgattcgcttgagtaaaattagtgaccgggaaagatcatcgactactactgctcagagatgtaatcggtaattaagacttcaagctcaataattaattaggagtaaatctggcttcgaatttttaaattgtcaacttccaaagaaggattggcaagactcaatctcaattgcccaacaaacatatggctctttacaaatttggaatctctttttgatggcaagaacgtcgtaattcctctgtcgatctcatgtaattaccaaactcatctacttattactttctttatatgcacttactgatgcggccgcttaattaatcacgagtggatgactgtcacgactgactcatgactgactactagtgctagcctcgaggtcgacacaactttgtataataaagttgtctagacctaggagctgtgctgggtaactcacatgagtcactggtcacatcagcggccgcagcttatagtaaagatttttttgttaataaaatgaaagttaatatttatggatttatttgaacatatttacaagtttttgttaataaatttatttacagaagtgttaaatttgaaaatgtgttaaatgagagttaatatttatggatataatattactttatttaaaaataaaatgaatttatattaaaatatgatttggtaaaagatattataaagaggaacttggatgagaaagacgacgatgggcaaaagttgcatggcacaccgcttttgttcagtaacatctgcactgtggcgcctttttcacactcaccatgcatgctgccacgtcagctttcacactatgacaccactggccatacacgttgccacctcagctttctcctcttctcactatgacacgactggccatgcatgcatgcatgctgccacctcagctcccgcctcttcacccgtgtctttctctcatgtcgcagtgctgcgtgccaacctcttctctctataaatagagagaagagaatgatggttaaactcaaaccaaaacaagaaaacatacacaaatagcaaaacggatccacaaccaaaaatgcttcagcacacttggcttccgaagcctcccaatctgaccctcttgtcagatgaggttcatctctggaggattcctcttgaccagcctgagtcacaacttcaagaccttgctgccaccctgagcagtgatgaattggcgagggcaaacagattctactttccagaacacagaaggcgtttcactgctgggagaggcatcctcagatccatcttgggtggatacttgggagtggaaccgggtcaagtcaagtttgattatgagtcccgtgggaaaccgatccttggtgacagatttgctgagagtggactcctgttcaacttgtctcacagccagaaccttgccttgtgtgctgtcaactacacgcgtcaaataggcattgatcttgaatatctgcgtccaacatctgacttggagtctcttgcaaagaggttctttctcccaagagaatatgaactcttgaggtcactccctgatgagcagaaacagaagattttctttcgttactggacttgcaaagaggcttatctcaaagcaacgggagatggaatagccaaacttgaagagatcgagatagcactcaccccaacagaacctgccaagctccaaacagctcctgcgtggtctctgttggagcttgtgccagatgacaattgtgttgcagctgtggctgttgcgggttttggttggcagcccaagttctggcattactgagtagttagcttaatcacttaggtcacccagtccaagcccggcctagcacgatgatcatgagtgttgctattgatgtatgttaatactatacacagtcatcgtgtgtgttttataaaactgtaagcttaggatgtttgaggctaatgtaattagcactacaccgtaataaatgagaggtttactttatgttttaataatgttcttacccttgctgctctctaaactgtaatggcgtacggttagctaaactaaagtaaaaatcgattcgcttgagtaaaattagtgaccgggaaagatcatcgactactactgctcagagatgtaatcggtaattaagacttcaagctcaataattaattaggagtaaatctggcttcgaatttttaaattgtcaacttccaaagaaggattggcaagactcaatctcaattgcccaacaaacatatggctctttacaaatttggaatctctttttgatggcaagaacgtcgtaattcctctgtcgatctcatgtaattaccaaactcatctacttattactttctttatatgcacttactgatgcggccgcttaattaactactgtcactgaggccgtagacgagtacggactgatctaactagtgctagcctcgaggtcgacacccagctttc

SEQ ID NO: 42 - DNA, 36102 bp, Artificial sequence
  plasmid pDAB7370
ttgtacaaagtggttgcggccgcttaattaaatttaaattcaattaatgcaatcttgattttcaacaacgaaggtaatggcgtaaaagaaaaaatgtatgttattgtattgatctttcatgatgttgaagcgtgccataatatgatgatgtataattaaaatattaactgtcgcattttattgaaatggcactgttatttcaaccatatctttgattctgttacatgacacgactgcaagaagtaaataatagacgccgttgttaaagaattgctatcatatgtgcctaactagagggaatttgagcgtcagacctaatcaaatattacaaaatatctcactctgtcgccagcaatggtgtaatcagcgcagacaaatggcgtaaagatcgcggaaaaacctccccgagtggcatgatagctgcctctgtattgctgatttagtcagccttatttgacttaagggtgccctcgttagtgacaaattgctttcaaggagacagccatgccccacactttgttgaaaaacaaattgcctttggggagacggtaaagccagttgctcttcaataaggaatgtcgaggaggcaatgtaaccgcctctggtagtacacttctctaatccaaaaatcaatttgtattcaagataccgcaaaaaacttatggtttaaaccctgcaggactagtccagaaggtaattatccaagatgtagcatcaagaatccaatgtttacgggaaaaactatggaagtattatgtaagctcagcaagaagcagatcaatatgcggcacatatgcaacctatgttcaaaaatgaagaatgtacagatacaagatcctatactgccagaatacgaagaagaatacgtagaaattgaaaaagaagaaccaggcgaagaaaagaatcttgaagacgtaagcactgacgacaacaatgaaaagaagaagataaggtcggtgattgtgaaagagacatagaggacacatgtaaggtggaaaatgtaagggcggaaagtaaccttatcacaaaggaatcttatcccccactacttatccttttatatttttccgtgtcatttttgcccttgagttttcctatataaggaaccaagttcggcatttgtgaaaacaagaaaaaatttggtgtaagctattttctttgaagtactgaggatacaacttcagagaaatttgtaagtttgtaggtaccagatctggatcccaaaccatgtctccggagaggagaccagttgagattaggccagctacagcagctgatatggccgcggtttgtgatatcgttaaccattacattgagacgtctacagtgaactttaggacagagccacaaacaccacaagagtggattgatgatctagagaggttgcaagatagatacccttggttggttgctgaggttgagggtgttgtggctggtattgcttacgctgggccctggaaggctaggaacgcttacgattggacagttgagagtactgtttacgtgtcacataggcatcaaaggttgggcctaggatctacattgtacacacatttgcttaagtctatggaggcgcaaggttttaagtctgtggttgctgttataggccttccaaacgatccatctgttaggttgcatgaggctttgggatacacagcccggggtacattgcgcgcagctggatacaagcatggtggatggcatgatgttggtttttggcaaagggattttgagttgccagctcctccaaggccagttaggccagttacccaaatctgagtagttagcttaatcacctagagctcgatcggcggcaatagcttcttagcgccatcccgggttgatcctatctgtgttgaaatagttgcggtgggcaaggctctctttcagaaagacaggcggccaaaggaacccaaggtgaggtgggctatggctctcagttccttgtggaagcgcttggtctaaggtgcagaggtgttagcgggatgaagcaaaagtgtccgattgtaacaagatatgttgatcctacgtaaggatattaaagtatgtattcatcactaatataatcagtgtattccaatatgtactacgatttccaatgtctttattgtcgccgtatgtaatcggcgtcacaaaataatccccggtgactttcttttaatccaggatgaaataatatgttattataatttttgcgatttggtccgttataggaattgaagtgtgcttgaggtcggtcgccaccactcccatttcataattttacatgtatttgaaaaataaaaatttatggtattcaatttaaacacgtatacttgtaaagaatgatatcttgaaagaaatatagtttaaatatttattgataaaataacaagtcaggtattatagtccaagcaaaaacataaatttattgatgcaagtttaaattcagaaatatttcaataactgattatatcagctggtacattgccgtagatgaaagactgagtgcgatattatggtgtaatacataggaattcgtttaaacgatctgcgtctaattttcggtccaacttgcacaggaaagacgtcgaccgcggtagctcttgcccagcagactgggcttccagtcctttcgctcgatcgggtccaatgttgtcctcagctgtgaaccggaagcggacgaccaacagtggaagaactgaaaggaacgagccgtctataccttgatgatcggcctctggtgaagggtatcatcgcagccaagcaagctcatgaaaggctgatgggggaggtgtataattatgaggcccacggcgggcttattctttagggaggatctatctcgttgctcaagtgcatggcgcaaagcagttattggagtgcggattttcgttggcatattattcgccacgagttagcagacgaagagaccttcatgaacgtggccaaggccagagttaagcagatgttacgccctgctgcaggcctttctattatccaatagttggttgatctttggaaagagcctcggctgaggcccatactgaaagagatcgatggatatcgatatgccatgttgtttgctagccagaaccagatcacatccgatatgctattgcagcttgacgcagatatggaggataagttgattcatgggatcgctcaggagtagctcatccatgcacgccgacaagaacagaaattccgtcgagttaacgcagccgcttacgacggattcgaaggtcatccattcggaatgtattagtttgcaccagctccgcgtcacacctgtcttcatttgaataagatgttagcaattgtttttagctttgtcttgttgtggcagggcggcaagtgcttcagacatcattctgttttcaaattttatgctggagaacagcttcttaattcctttggaaataatagactgcgtcttaaaattcagatgtctggatatagatatgattgtaaaataacctatttaagtgtcatttagaacataagttttatgaatgttcttccattttcgtcatcgaacgaataagagtaaatacaccttttttaacattacaaataagttcttatacgttgtttatacaccgggaatcatttccattattttcgcgcaaaagtcacggatattcgtgaaagcgacataaactgcgaaatttgcggggagtgtcttgagtttgcctcgaggctagcgcatgcacatagacacacacatcatctcattgatgcttggtaataattgtcattagattgtttttatgcatagatgcactcgaaatcagccaattttagacaagtatcaaacggatgtgacttcagtacattaaaaacgtccgcaatgtgttattaagttgtctaagcgtcaatttgatttacaattgaatatatcctgccccagccagccaacagctcgatttacaattgaatatatcctgccggccggcccacgcgtgtcgaggaattctgatctggcccccatttggacgtgaatgtagacacgtcgaaataaagatttccgaattagaataatttgtttattgctttcgcctataaatacgacggatcgtaatttgtcgttttatcaaaatgtactttcattttataataacgctgcggacatctacatttttgaattgaaaaaaaattggtaattactctttctttttctccatattgaccatcatactcattgctgatccatgtagatttcccggacatgaagccatttacaattgaatatatcctgccgccgctgccgctttgcacccggtggagcttgcatgttggtttctacgcagaactgagccggttaggcagataatttccattgagaactgagccatgtgcaccttccccccaacacggtgagcgacggggcaacggagtgatccacatgggacttttaaacatcatccgtcggatggcgttgcgagagaagcagtcgatccgtgagatcagccgacgcaccgggcaggcgcgcaacacgatcgcaaagtatttgaacgcaggtacaatcgagccgacgttcacgcggaacgaccaagcaagcttggctgccatttttggggtgaggccgttcgcggccgaggggcgcagcccctggggggatgggaggcccgcgttagcgggccgggagggttcgagaagggggggcaccccccttcggcgtgcgcggtcacgcgcacagggcgcagccctggttaaaaacaaggtttataaatattggtttaaaagcaggttaaaagacaggttagcggtggccgaaaaacgggcggaaacccttgcaaatgctggattttctgcctgtggacagcccctcaaatgtcaataggtgcgcccctcatctgtcagcactctgcccctcaagtgtcaaggatcgcgcccctcatctgtcagtagtcgcgcccctcaagtgtcaataccgcagggcacttatccccaggcttgtccacatcatctgtgggaaactcgcgtaaaatcaggcgttttcgccgatttgcgaggctggccagctccacgtcgccggccgaaatcgagcctgcccctcatctgtcaacgccgcgccgggtgagtcggcccctcaagtgtcaacgtccgcccctcatctgtcagtgagggccaagttttccgcgaggtatccacaacgccggcggccgcggtgtctcgcacacggcttcgacggcgtttctggcgcgtttgcagggccatagacggccgccagcccagcggcgagggcaaccagcccggtgagcgtcggaaagggtcgacggatcttttccgctgcataaccctgcttcggggtcattatagcgattttttcggtatatccatcctttttcgcacgatatacaggattttgccaaagggttcgtgtagactttccttggtgtatccaacggcgtcagccgggcaggataggtgaagtaggcccacccgcgagcgggtgttccttcttcactgtcccttattcgcacctggcggtgctcaacgggaatcctgctctgcgaggctggccggctaccgccggcgtaacagatgagggcaagcggatggctgatgaaaccaagccaaccaggaagggcagcccacctatcaaggtgtactgccttccagacgaacgaagagcgattgaggaaaaggcggcggcggccggcatgagcctgtcggcctacctgctggccgtcggccagggctacaaaatcacgggcgtcgtggactatgagcacgtccgcgagctggcccgcatcaatggcgacctgggccgcctgggcggcctgctgaaactctggctcaccgacgacccgcgcacggcgcggttcggtgatgccacgatcctcgccctgctggcgaagatcgaagagaagcaggacgagcttggcaaggtcatgatgggcgtggtccgcccgagggcagagccatgacttttttagccgctaaaacggccggggggtgcgcgtgattgccaagcacgtccccatgcgctccatcaagaagagcgacttcgcggagctggtattcgtgcagggcaagattcggaataccaagtacgagaaggacggccagacggtctacgggaccgacttcattgccgataaggtggattatctggacaccaaggcaccaggcgggtcaaatcaggaataagggcacattgccccggcgtgagtcggggcaatcccgcaaggagggtgaatgaatcggacgtttgaccggaaggcatacaggcaagaactgatcgacgcggggttttccgccgaggatgccgaaaccatcgcaagccgcaccgtcatgcgtgcgccccgcgaaaccttccagtccgtcggctcgatggtccagcaagctacggccaagatcgagcgcgacagcgtgcaactggctccccctgccctgcccgcgccatcggccgccgtggagcgttcgcgtcgtctcgaacaggaggcggcaggtttggcgaagtcgatgaccatcgacacgcgaggaactatgacgaccaagaagcgaaaaaccgccggcgaggacctggcaaaacaggtcagcgaggccaagcaggccgcgttgctgaaacacacgaagcagcagatcaaggaaatgcagctttccttgttcgatattgcgccgtggccggacacgatgcgagcgatgccaaacgacacggcccgctctgccctgttcaccacgcgcaacaagaaaatcccgcgcgaggcgctgcaaaacaaggtcattttccacgtcaacaaggacgtgaagatcacctacaccggcgtcgagctgcgggccgacgatgacgaactggtgtggcagcaggtgttggagtacgcgaagcgcacccctatcggcgagccgatcaccttcacgttctacgagctttgccaggacctgggctggtcgatcaatggccggtattacacgaaggccgaggaatgcctgtcgcgcctacaggcgacggcgatgggcttcacgtccgaccgcgttgggcacctggaatcggtgtcgctgctgcaccgcttccgcgtcctggaccgtggcaagaaaacgtcccgttgccaggtcctgatcgacgaggaaatcgtcgtgctgtttgctggcgaccactacacgaaattcatatgggagaagtaccgcaagctgtcgccgacggcccgacggatgttcgactatttcagctcgcaccgggagccgtacccgctcaagctggaaaccttccgcctcatgtgcggatcggattccacccgcgtgaagaagtggcgcgagcaggtcggcgaagcctgcgaagagttgcgaggcagcggcctggtggaacacgcctgggtcaatgatgacctggtgcattgcaaacgctagggccttgtggggtcagttccggctgggggttcagcagccagcgctttactggcatttcaggaacaagcgggcactgctcgacgcacttgcttcgctcagtatcgctcgggacgcacggcgcgctctacgaactgccgataaacagaggattaaaattgacaattgtgattaaggctcagattcgacggcttggagcggccgacgtgcaggatttccgcgagatccgattgtcggccctgaagaaagctccagagatgttcgggtccgtttacgagcacgaggagaaaaagcccatggaggcgttcgctgaacggttgcgagatgccgtggcattcggcgcctacatcgacggcgagatcattgggctgtcggtcttcaaacaggaggacggccccaaggacgctcacaaggcgcatctgtccggcgttttcgtggagcccgaacagcgaggccgaggggtcgccggtatgctgctgcgggcgttgccggcgggtttattgctcgtgatgatcgtccgacagattccaacgggaatctggtggatgcgcatcttcatcctcggcgcacttaatatttcgctattctggagcttgttgtttatttcggtctaccgcctgccgggcggggtcgcggcgacggtaggcgctgtgcagccgctgatggtcgtgttcatctctgccgctctgctaggtagcccgatacgattgatggcggtcctgggggctatttgcggaactgcgggcgtggcgctgttggtgttgacaccaaacgcagcgctagatcctgtcggcgtcgcagcgggcctggcgggggcggtttccatggcgttcggaaccgtgctgacccgcaagtggcaacctcccgtgcctctgctcacctttaccgcctggcaactggcggccggaggacttctgctcgttccagtagctttagtgtttgatccgccaatcccgatgcctacaggaaccaatgttctcggcctggcgtggctcggcctgatcggagcgggtttaacctacttcctttggttccgggggatctcgcgactcgaacctacagttgtttccttactgggctttctcagcccccgagcgcttagtgggaatttgtaccccttatcgaaccgggagcacaggatgacgcctaacaattcattcaagccgacaccgcttcgcggcgcggcttaattcaggagttaaacatcatgagggaagcggtgatcgccgaagtatcgactcaactatcagaggtagttggcgtcatcgagcgccatctcgaaccgacgttgctggccgtacatttgtacggctccgcagtggatggcggcctgaagccacacagtgatattgatttgctggttacggtgaccgtaaggcttgatgaaacaacgcggcgagctttgatcaacgaccttttggaaacttcggcttcccctggagagagcgagattctccgcgctgtagaagtcaccattgttgtgcacgacgacatcattccgtggcgttatccagctaagcgcgaactgcaatttggagaatggcagcgcaatgacattcttgcaggtatcttcgagccagccacgatcgacattgatctggctatcttgctgacaaaagcaagagaacatagcgttgccttggtaggtccagcggcggaggaactctttgatccggttcctgaacaggatctatttgaggcgctaaatgaaaccttaacgctatggaactcgccgcccgactgggctggcgatgagcgaaatgtagtgcttacgttgtcccgcatttggtacagcgcagtaaccggcaaaatcgcgccgaaggatgtcgctgccgactgggcaatggagcgcctgccggcccagtatcagcccgtcatacttgaagctaggcaggcttatcttggacaagaagatcgcttggcctcgcgcgcagatcagttggaagaatttgttcactacgtgaaaggcgagatcaccaaggtagtcggcaaataatgtctaacaattcgttcaagccgacgccgcttcgcggcgcggcttaactcaagcgttagagagctggggaagactatgcgcgatctgttgaaggtggttctaagcctcgtcttgcgatggcatttcgatccattcccattccgcgctcaagatggcttcccctcggcagttcatcagggctaaatcaatctagccgacttgtccggtgaaatgggctgcactccaacagaaacaatcaaacaaacatacacagcgacttattcacacgagctcaaattacaacggtatatatcctgccagtcagcatcatcacaccaaaagttaggcccgaatagtttgaaattagaaagctcgcaattgaggtctacaggccaaattcgctcttagccgtacaatattactcaccggatcctaaccggtttaattaaggcgcgccatgcccgggcaagcggccgcacaagtttgtacaaaaaagcaggcttctagacctaggtggagtcatcacgcagactatctcagcatgtgcgtagcacgcggccgcagcttatagtaaagatttttttgttaataaaatgaaagttaatatttatggatttatttgaacatatttacaagtttttgttaataaatttatttacagaagtgttaaatttgaaaatgtgttaaatgagagttaatatttatggatataatattactttatttaaaaataaaatgaatttatattaaaatatgatttggtaaaagatattataaagaggaacttggatgagaaagacgacgatgggcaaaagttgcatggcacaccgcttttgttcagtaacatctgcactgtggcgcctttttcacactcaccatgcatgctgccacgtcagctttcacactatgacaccactggccatacacgttgccacctcagctttctcctcttctcactatgacacgactggccatgcatgcatgcatgctgccacctcagctcccgcctcttcacccgtgtctttctctcatgtcgcagtgctgcgtgccaacctcttctctctataaatagagagaagagaatgatggttaaactcaaaccaaaacaagaaaacatacacaaatagcaaaacggatccacaaccaaaaatggcttcctctatgctctcttccgctactatggttgcctctccggctcaggccactatggtcgctcctttcaacggacttaagtcctccgctgccttcccagccacccgcaaggctaacaacgacattacttccatcacaagcaacggcggaagagttaactgcatgcaggtgtggcctccgattggaaagaagaagtttgagactctctcttaccttcctgaccttaccgattccgaagcagcgaggctgcaagagcagaaaggaggtgagatggacacgaggattgcgatcataggcatgagcgccatacttccttgtggaaccacggtgagagagtcatgggagaccataagggctggcattgattgcctgtctgatcttcctgaggatcgtgttgatgtgactgcgtactttgacccagtcaagaccacaaaggacaaaatctactgcaagagaggaggtttcattcctgagtatgactttgatgcgcgtgagtttggtctcaacatgttccagatggaagattctgatgcgaatcagaccatctcacttctcaaggtcaaagaagcacttcaagatgctgggattgatgcacttggaaaggagaagaaaaacataggatgcgtgcttggcattggaggtggacagaagagttcacatgagttctacagcagactcaactatgtggttgtggagaaagtcttgagaaagatggggatgccagaggaagatgtcaaagtggctgtggagaagtacaaagcgaacttcccagaatggagacttgactctttccctggattccttgggaatgtcactgctggcagatgcaccaacacattcaacttggatggcatgaactgcgttgtggatgctgcatgtgcaagctccttgatagcagtcaaggttgcgattgatgaactgctctatggtgactgcgacatgatggtcactggtgcaacctgcacagacaactccattgggatgtacatggctttctcaaagacacctgtgttcagcacggacccaagtgtgagagcgtatgatgagaaaacgaaagggatgctcattggtgagggatcagccatgttggtgctcaaacgttatgcagatgcagtgagggatggtgatgagattcatgctgtgattcgtggttgtgcaagctcaagtgatggcaaagcagctggcatctacactcccacaatcagtggtcaagaggaagccttgagacgtgcatacaatcgtgcctgcgttgaccctgccactgtcactttggttgagggtcatgggactggcactccagttggagataggattgagttgactgcgttgaggaacttgtttgacaaagcgtatggtgaagggaacacagagaaagttgcagttggaagtatcaagtccagtattggtcatttgaaggctgttgctggtcttgctggaatgatcaaggtcatcatggctctcaaacacaagactttgcctggaacgatcaatgtggacaatccacccaatctctatgacaacactcccatcaatgagtcatccctctacatcaacacgatgaacagaccctggttccctccacctggtgttccgagacgtgctggaatatccagctttggctttggaggtgccaactaccatgcagtgttggaagaggctgaaccagagcacacgacagcgtacagactcaacaaacgtccacaaccggtgttgatgatggctgcaactcctgctgcgttgcagagcctttgtgaagctcagctgaaagagtttgaagctgcgatcaaggagaatgagacagtcaagaatactgcctacatcaagtgtgtcaagtttggagaacagttcaagttccctgggagcatacctgcgaccaatgcgagactgggattcttggtcaaagatgcggaggatgcgtgctccacgcttcgtgctatatgtgctcagtttgccaaagatgtgaccaaagaagcgtggaggcttccgagagaaggagtttctttccgtgccaaaggcattgccaccaatggtgctgttgctgcactcttctctggacaaggtgctcagtacacacacatgttcagtgaagttgcgatgaactggcctcagttcagacagtccattgctgcaatggacgctgcacagtccaaggttgctggaagtgacaaagactttgaaagagtctctcaagtcctgtacccaaggaaaccgtacgaacgtgagccagaacaagatcacaagaaaatctcactcacagcatacagccagccgtcaaccctggcatgtgctcttggtgcctttgagattttcaaggaagctggattcactccagactttgcagctggacacagcttgggtgagtttgctgcgctctatgcagctggttgtgttgacagagatgagttgtttgaacttgtttgcagaagggcaaggatcatgggaggcaaagatgcacctgccacacccaaaggttgcatggcagctgtcataggacccaacgcagagaacatcaaggttcaagctgccaacgtctggcttggaaactcaaactctccgtctcagactgtcattactgggtctgttgaagggattcaagctgaaagtgccagattgcagaaggaagggttcagagttgtgcctcttgcttgtgagtctgccttccattctccacagatggaaaatgccagctcagctttcaaagatgtcatatccaaggtttccttccgtacacccaaagcagaaacaaagctcttcagcaatgtttctggagagacctatccgacggatgccagagagatgctcactcaacacatgacctcatctgtgaagttcctgacccaagtgaggaacatgcaccaagctggtgcgagaatctttgttgagtttggaccgaaacaagttctcagcaaacttgtttctgaaaccctcaaagatgacccgtctgttgtcacagtgtctgtgaacccagcttctggcacggactctgacatacagttgagggatgctgcagttcagctggttgtggctggtgtcaatcttcaagggtttgacaagtgggatgctcctgatgccacgaggatgcaagccatcaagaaaaagagaaccacactcagactttcagctgccacctatgtcagtgacaagaccaagaaagtgagggatgctgccatgaacgacggaagatgtgtcacatacctcaagggtgctgcaccactcatcaaggctcctgaacctgtggttgacgaagctgccaagagggaggctgaaaggcttcagaaggagcttcaagacgctcagaggcagcttgacgacgccaaacgtgcagctgcagaagccaactccaaacttgctgctgccaaggaggaagccaagactgctgcagcttcagccaagcctgcagttgacactgctgttgtggagaaacatcgtgccatcctcaagtccatgctggctgagctggatggttatggaagtgttgatgcttcttcccttcagcaacagcaacagcaacagactgctccggcgcctgttaaagccgctgcccctgccgctcccgttgcaagtgctcctgctcccgccgtgtccaacgagttgcttgagaaagctgagacagttgtgatggaggttctcgctgccaagactggatacgaaacagacatgattgaggcggacatggagcttgagactgagttgggaattgacagcatcaagagggttgaaattctttctgaagtccaagctatgcttaacgttgaggcgaaagatgttgatgctctctctaggacgagaacagtgggtgaagttgtcaacgctatgaaggcagaaatcgctggttcttccgctccggcgccggcagctgccgcacctgcaccggctaaagcggctccagctgcagctgcaccagctgtttctaatgagctgctcgaaaaggcagaaactgttgtgatggaagtccttgctgccaaaactggctacgaaactgacatgatagaatcagacatggagcttgagacggagcttggaattgattccatcaagcgtgtggaaatcctcagtgaagtccaagccatgctcaatgtggaagctaaggatgtggatgctctctcaaggaccagaactgtcggtgaggttgtcaatgccatgaaggctgagatagctggaggctccgctcctgcgccggccgctgccgctcctggtcccgctgccgcggctccagctccagctgcagccgctccggccgtctcaaacgaactccttgaaaaagctgagaccgtcgtgatggaggtcttggcagctaaaaccggctatgagactgacatgattgagtctgacatggaattggagacagaacttgggatagacagcatcaaacgtgttgaaatcctcagtgaggtccaagctatgctgaacgtggaagcgaaggatgttgatgctctgtccagaacgaggaccgttggtgaggttgtggatgccatgaaggctgaaattgctggagggtctgcgcccgcgccagctgcagccgctcctgcacccgcagccgcggcacctgctccagctgcacctgcacctgccgtttcttcagaactcttggagaaggctgagacggttgtgatggaggttttggctgcaaagactggctatgagaccgacatgattgaatctgatatggaattggagacagagcttgggatcgattccatcaaaagagtggagatcctgagtgaagtccaagccatgctcaatgttgaagctaaggatgttgatgcactttcaagaacaaggacagtgggtgaggttgtggatgccatgaaggcggagattgctggagggagcgcgcctgcgccagctgccgcggcacctgcaccggcagccgcagctccagctccagctgcaccagcaccggccgcgcccgcgccagctgtttcatccgaactcctggaaaaggccgagacggttgtgatggaggtgctcgcagctaagactggttacgagaccgacatgattgaaagtgacatggagcttgaaaccgagttgggaatagatagcatcaaacgtgttgaaatcttgtctgaggtccaagctatgttgaacgtggaggcaaaagatgtcgatgcgctttcaagaaccagaacagtcggtgaggtcgtggacgccatgaaggctgaaattgccggaagctctgctagtgcgccagctgcagccgcacctgcacctgctgccgcggcacctgctccagctgcagccgctcctgccgtcagcaatgagttgctggagaaagccgaaacagttgtgatggaagtccttgctgcaaaaactggttacgaaacggacatgattgagtcagacatggaattggagaccgaacttggaatagattccatcaagagagtggagatcctctctgaggtgcaagccatgctcaacgttgaggctaaagatgttgatgcactcagtaggacaagaactgtgggggaagttgtcgatgcgatgaaggctgagattgctggaggctctgctcctgcgccggcagctgccgcacctgcacccgcagccgcggcaccagctgtcagcaacgaattgcttgagaaggctgaaacagttgtcatggaagtgctggctgcaaaaaccggctatgagactgacatgattgagtctgacatggaacttgagacggaattgggcattgacagcatcaagcgtgttgagatcctcagtgaagtccaagcaatgctcaatgtggaggctaaggatgtggatgccctctcaaggaccagaacagttggtgaggtcgttgatgcgatgaaggcggagatcgctggaagttccgcgcctgcgccagctgcagccgctcctgcacccgcagccgcggcaccggctccagctgcagccgcaccggccgtctcctcagaactcctggaaaaggctgagacagttgtgatggaagtccttgctgcgaaaactggctatgagaccgacatgattgaatctgacatggaactggagaccgagcttggaattgactccatcaaacgtgttgaaatcctctctgaggttcaagcgatgttgaatgtggaggccaaagatgttgatgctctttccagaacaaggacggtgggagaggtggttgatgccatgaaggctgagatagctgggggttctgctcctgcgccagctgcagccgctcctgctcccgctgccgcggcaccagctgtcagcaacgaactccttgaaaaagctgaaactgttgtgatggaggttttggctgcaaagactggatacgagactgacatgatagagtcagacatggagttggaaacagagcttgggattgatagcatcaagcgtgtggaaatcctttctgaggttcaagccatgctgaacgttgaggccaaagatgtcgatgctttgtcaaggaccagaacggttggagaagtggtcgatgccatgaaggctgagatagctggtggatcagcccctgctccggctgcagccgctcctgcaagtgccggtgctgcaccagctgtgaagattgattcagttcatggtgctgactgtgacgatttgtcactgatgcacgcaaaggtggttgacatcagaaggccagatgaactgattctggaaagaccggagaaccgtccagttcttgtcgttgacgatggctcagagttgacacttgctcttgtgagggtgttgggagcctgtgcagttgtcttgacctttgagggattgcagttggctcagagagctggtgcagctgccattcgtcatgttctggctaaggacctttcagcagaatcagctgagaaggccatcaaagaggctgagcaaagatttggagcgttgggaggcttcataagccagcaagcagaaaggtttgaaccagctgagatactgggtttcacactcatgtgtgcgaagtttgccaaagcctctctctgcactgctgtggctggaggtcgtcctgccttcatcggtgtggctaggcttgacggcagacttggattcacctctcaaggcacttctgacgcactcaagagagcacagcgtggagcgatctttggactctgcaagacaatagggttggagtggtcagaatctgatgtgttcagccgtggtgtggacattgctcaagggatgcacccagaagatgctgcagttgccatagttagggagatggcgtgtgctgacatcagaatcagagaggttgggattggagcaaaccagcaaagatgcacaatcagagctgccaagttggagactgggaaccctcagagacagatagcgaaagacgatgtgcttctggtttctggaggtgctcgtgggatcacacctctttgcatccgtgagatcacgcgtcagattgctggaggcaagtacattctgttgggtcgtagcaaagtttctgcgtctgaaccagcatggtgtgctggcatcactgatgagaaggctgtgcagaaagctgccacccaagagttgaagagggccttcagtgctggtgaaggacccaaacccactccaagggctgtcacgaaacttgtgggatctgttcttggtgctcgtgaagtgagaagctccattgctgccattgaagctctgggtggcaaagcgatctacagctcttgtgatgtgaactctgctgcagatgttgccaaagcagttagggatgcagagtcccagcttggtgccagagttagtggaatcgttcacgcttctggtgtgctccgtgatcgtctcatagagaagaaactccctgacgagtttgatgctgtctttgggaccaaagtcactgggttggagaatcttctggctgcagttgatcgtgccaacctcaaacacatggttctcttcagctcccttgctggtttccacggcaatgttggtcagtctgactatgcgatggcaaacgaagctctcaacaagatgggtttggaacttgcgaaggatgtcagtgtcaagtccatctgctttggtccctgggatggtgggatggtgacacctcaactcaagaaacagtttcaagaaatgggagttcagatcattcctcgtgaaggaggtgctgatacagttgcgaggattgtgttgggatcaagtcctgctgagatccttgttggaaactggaggacaccatccaagaaagttggaagtgacacgatcaccctgcatagaaagatcagtgccaagtccaatcccttcttggaggatcatgtcatacaaggcagaagggtgttgccaatgacccttgctattgggagccttgctgagacctgccttggactcttccctggctactctctctgggccatagatgacgcacagctcttcaaaggtgtcactgttgatggagacgtcaactgtgaagtgaccctcacaccgtccactgctccgagtgggagggtgaatgtccaagcgacgctcaagacgttctcaagtggaaaacttgttccagcctacagagctgtcatagtgttgtccaaccaaggtgctccacctgccaatgcaaccatgcagcctccgagccttgatgcagatcctgctttgcaagggtcagtctatgatggcaagactctctttcatggtcctgcgttcagaggcattgatgacgttctcagctgcaccaagagccagcttgttgccaagtgttctgctgttcctggatcagatgcagccagaggagagtttgcaactgacactgatgcacatgatccctttgtcaatgatcttgcctttcaagcaatgttggtctgggtgaggagaacgctgggacaagctgcactcccgaactccattcagaggatagtccaacacagaccggtcccacaagacaaacccttctacatcaccctcagatccaatcagagtggtggacatagccagcacaaacatgcacttcagttccacaacgaacaaggtgatctcttcattgatgttcaagcctctgtcattgcgacagactcacttgcgttctgagtagttagcttaatcacttaggtcacccagtccaagcccggcctagcacgatgatcatgagtgttgctattgatgtatgttaatactatacacagtcatcgtgtgtgttttataaaactgtaagcttaggatgtttgaggctaatgtaattagcactacaccgtaataaatgagaggtttactttatgttttaataatgttcttacccttgctgctctctaaactgtaatggcgtacggttagctaaactaaagtaaaaatcgattcgcttgagtaaaattagtgaccgggaaagatcatcgactactactgctcagagatgtaatcggtaattaagacttcaagctcaataattaattaggagtaaatctggcttcgaatttttaaattgtcaacttccaaagaaggattggcaagactcaatctcaattgcccaacaaacatatggctctttacaaatttggaatctctttttgatggcaagaacgtcgtaattcctctgtcgatctcatgtaattaccaaactcatctacttattactttctttatatgcacttactgatgcggccgcttaattaagatgagtgatactcaggactcaggactcactctgctgatcactagtgctagcctcgaggtcgacacaactttgtatacaaaagttgtctagacctaggctcagcaactcatccagtcaagttcgagtcagtgagttgggcggccgcagcttatagtaaagatttttttgttaataaaatgaaagttaatatttatggatttatttgaacatatttacaagtttttgttaataaatttatttacagaagtgttaaatttgaaaatgtgttaaatgagagttaatatttatggatataatattactttatttaaaaataaaatgaatttatattaaaatatgatttggtaaaagatattataaagaggaacttggatgagaaagacgacgatgggcaaaagttgcatggcacaccgcttttgttcagtaacatctgcactgtggcgcctttttcacactcaccatgcatgctgccacgtcagctttcacactatgacaccactggccatacacgttgccacctcagctttctcctcttctcactatgacacgactggccatgcatgcatgcatgctgccacctcagctcccgcctcttcacccgtgtctttctctcatgtcgcagtgctgcgtgccaacctcttctctctataaatagagagaagagaatgatggttaaactcaaaccaaaacaagaaaacatacacaaatagcaaaacggatccacaaccaaaaatggcttcctctatgctctcttccgctactatggttgcctctccggctcaggccactatggtcgctcctttcaacggacttaagtcctccgctgccttcccagccacccgcaaggctaacaacgacattacttccatcacaagcaacggcggaagagttaactgcatgcaggtgtggcctccgattggaaagaagaagtttgagactctctcttaccttcctgaccttaccgattccgaagctgcaaggaacgtgagtgcggctcatgagatgcatgacgagaagaggatagctgttgtgggcatggctgttcagtatgctggatgcaaaacgaaagacgagttctgggaagttctcatgaatggaaaagttgagagcaaagtgatcagcgacaaacgtcttggttcaaattaccgtgctgaacactacaaagctgaaaggagcaagtatgctgacaccttctgcaatgagacatatggaactcttgatgagaacgaaatagacaatgagcatgaactccttttgaaccttgccaaacaagccttggctgaaacatctgtcaaagattcaacaagatgtggcatagtttctggatgcctcagcttcccgatggacaacctccaaggtgaactcttgaatgtgtaccagaaccatgttgagaagaaacttggtgccagagttttcaaagatgcctctcactggtcagaaagagaacagtccaacaaaccagaggctggtgacagaagaatcttcatggaccctgcttcctttgttgctgaggaactcaatcttggcgctctccactactctgttgatgctgcctgtgccactgcgctctatgtgctcagactggcgcaagatcacttggtctctggtgcagctgatgtgatgctttgtggtgcaacatgcctgccggagccgtttttcatactctctgggttctcaaccttccaagccatgcctgttggaacgggtcagaatgtgtccatgccgctgcacaaagattctcaaggattgacccctggtgaaggaggttccatcatggtcctcaaacgtttggatgacgcaatcagagatggagatcacatctatggaacacttttgggagccaatgtcagcaacagtggcactggtctgccacttaaaccccttttgccgtcagagaaaaagtgcctcatggacacctacacacgtatcaatgtgcatccccacaagattcagtatgttgaatgccatgcaactgggactccacaaggtgatcgtgtggaaattgatgctgtgaaggcttgctttgaaggcaaagtcccacgttttggaaccacaaaagggaactttggacacacattggtggcagctgggtttgctggcatgtgcaaagtgcttctctccatgaagcacgggatcattccacccactccgggaatagatgacgaaacgaagatggaccctctggttgtctctggtgaggccattccctggccagaaacgaatggagaaccgaagcgtgctggtctctcagcgtttggatttggtgggaccaatgctcatgctgtctttgaggaacatgacccaagcaatgctgcatgcactggccatgactccatttctgctctctctgcacgttgtggtggtgagtcaaacatgagaatagcaatcactgggatggatgccacttttggtgctttgaaaggattggatgcttttgaaagggccatctacactggtgctcatggtgctataccactcccagaaaagagatggagattcctggggaaagacaaggacttccttgatctttgtggagtcaaagcaacaccgcatggctgttacattgaagatgttgaagttgatttccagaggctgaggactccaatgactcctgaagatatgctcttgcctcaacagcttctggctgtcaccacaattgatagggccatattggactctggcatgaagaaaggtggaaatgtggctgtctttgtggggttggggaccgatcttgaactctaccgtcaccgtgcaagggttgctctcaaggagagagtgaggcctgaagccagcaagaaactcaatgacatgatgcagtacatcaatgattgtgggacaagcacttcttacaccagctacataggcaacttggttgcaacaagggtcagttcacaatggggcttcacgggaccttccttcacaatcacagaaggcaacaattctgtgtacagatgtgctgaacttggcaaatacctcttggaaacgggagaggttgatggggttgtggttgcgggtgttgatctctgtgggagtgctgagaacctttacgtcaagtcaaggcgtttcaaggtgtctacatctgacaccccgagagccagctttgatgcagctgctgatggttactttgttggagagggctgtggtgcatttgtgctcaagcgtgagacaagctgcaccaaggatgacagaatctatgcttgcatggatgccatagttcctggaaatgttccatctgcatgtttgagagaggcattggatcaagccagagtcaagcctggagacatcgagatgttggagctttctgctgattcagcgaggcatttgaaggacccgtctgttctcccaaaggaactcactgctgaggaagagattggcggacttcagacgattcttcgtgacgatgacaagctcccaaggaatgttgcaactggaagtgtcaaggccactgttggtgacactggttatgcttctggtgctgccagtttgattaaggctgcgctttgcatctacaaccgttacctgcccagcaatggagatgactgggatgaacctgcacctgaagcaccctgggacagcacactctttgcgtgccagacctcaagagcttggttgaagaaccctggtgagagacgttatgcggctgtttccggagtcagtgaaaccagaagttgctacagtgtgctgctttctgaagcagagggacactacgagagagagaacagaatcagtttggatgaggaagcacccaagctcattgtgttgagagcagactcccatgaagagattcttggaagattggacaagataagggaaaggttcttgcagcccacgggtgctgcacccagagagtctgaattgaaggcgcaagcccgtaggatctttcttgaactccttggtgagacccttgcccaagatgcagcttcatctggaagtcagaagccccttgctctcagcttggtctccactccatccaagctccagagagaggtggaacttgcggcaaaaggcattccgagatgtctcaagatgagacgtgattggagttcccctgctggaagcagatatgcgcctgagcctttggccagtgacagagttgccttcatgtatggagaaggaaggagcccttactatggcatcacacaagacattcataggatttggcctgaacttcatgaggtcatcaatgagaaaacaaaccgtctctgggctgaaggtgacagatgggtcatgccaagggccagcttcaagagtgagcttgagtcacaacagcaagagtttgacagaaacatgattgaaatgttccgtcttggaatcctcacctcaattgccttcacaaacctggcgagagatgttctcaacatcacgcccaaagcagcctttggactcagtttgggagagatttccatgatctttgctttctccaagaaaaacggtttgataagcgatcagttgacaaaggatttgagagagtcagatgtctggaacaaagctctggctgttgagttcaatgcgctcagagaagcctggggcattccacagtctgtcccaaaagatgagttctggcaaggttacatagtgaggggaacgaaacaagacatagaagcagccatagcaccagactcaaagtatgtgaggttgaccatcatcaatgatgccaacactgctctcatcagtggaaagcctgatgcatgcaaagctgcgattgctcgtcttggtggcaacatccctgcgcttccagtcactcaaggcatgtgtgggcattgcccagaggtgggaccttacaccaaggacatcgcaaagatccacgccaaccttgagttccctgtggttgatggtcttgatctctggactaccataaaccagaagaggcttgtgccaagagccacgggtgccaaagatgaatgggctccttcatcctttggggagtatgctggacagctctatgagaaacaagccaacttccctcagatagttgaaaccatctacaagcagaactatgatgtgtttgttgaagttgggccaaacaatcacagaagcacagcagtgagaaccacgcttggaccacagagaaaccaccttgctggtgccatagacaagcagaacgaggatgcttggacgacaatagtcaagctcgtggcttcattgaaggctcaccttgttcctggagtgaccatcagtccgctctaccactccaagctcgttgcagaggctgaggcttgttatgctgcgctctgtaaaggtgagaaacccaagaaaaacaagtttgtgagaaagattcagttgaatggcagattcaacagcaaggcagaccccatctcctcagcagaccttgcatccttcccacctgcggaccctgcgattgaagctgccatctcttcaaggatcatgaagcctgtggctccgaaattctatgcgcgtctcaacattgatgagcaagatgagaccagagatccgatcttgaacaaggacaatgcgccttccagctccagctcttccagcagttcctcttccagcagttcatctccgtctcctgctccttcagctccagttcagaagaaagctgccccagctgcggagacaaaagctgttgccagtgctgatgcacttcgtagtgccctgcttgatcttgactccatgcttgcgctcagctctgcaagtgcttctggcaaccttgttgagactgcgccatctgatgccagtgtcattgtccctccgtgcaacattgctgatcttggcagcagagctttcatgaaaacttatggtgtttctgcgcctctgtacaccggtgcaatggccaagggaattgcctctgcggacttggtgatcgcagctggaaggcaaggaatccttgcgtcatttggtgctggaggccttccaatgcaagttgtgcgtgagtccattgaaaagattcaagctgccctgcccaatggaccatatgctgtcaacctcatccattctccttttgacagcaaccttgagaagggaaatgttgatctcttcttggaaaagggtgtcacttttgttgaggcttcagccttcatgacgttgacaccgcaagttgtcagatacagagcggctgggttgacgaggaatgcagatgggtcagtcaacataaggaacagaatcattgggaaagtctccagaactgagctggctgaaatgttcatgcgtcctgcacctgagcatcttttgcagaagctcattgcttctggggagatcaatcaagaacaagctgagttggccagacgtgttcctgtggctgatgacattgcggttgaagctgattctggtggacacactgacaaccgtccaatccatgtcattctgcctctgattatcaacctgagggataggcttcacagagagtgtggatacccagcaaacctgagggttcgtgttggtgctgggggtggcattgggtgtccccaagctgcgctggcaactttcaacatgggtgcctctttcattgtcactggaacagtgaaccaagttgccaaacaatctgggacgtgtgacaatgtgaggaaacagcttgcgaaagcaacttactcagatgtttgcatggcaccggcagctgacatgtttgaggaaggtgtgaaacttcaagttttgaagaaaggaacaatgttcccttcaagagccaacaaactctatgagttgttctgcaagtatgattcttttgagtccatgcctccagcagagcttgcgagggttgagaaaagaatcttcagtcgtgcattggaagaggtctgggatgagaccaagaacttctacatcaaccgtctccacaacccagagaagatacagagggctgagagggaccccaaactgaagatgtcactgtgtttcagatggtatctgtccctggcttcaaggtgggccaacactggagcttctgacagagtcatggactaccaagtttggtgtggtcctgccattggttcattcaatgatttcatcaaaggaacttaccttgatccggcagtggcaaatgagtacccgtgtgttgtgcagatcaacaaacagattcttagaggagcgtgcttcttgaggcgtcttgaaatactgagaaatgcaaggctttcagatggtgcagctgcacttgtggcgagcattgatgacacatatgtccctgctgagaagctgtgagtagttagcttaatcacttaggtcacccagtccaagcccggcctagcacgatgatcatgagtgttgctattgatgtatgttaatactatacacagtcatcgtgtgtgttttataaaactgtaagcttaggatgtttgaggctaatgtaattagcactacaccgtaataaatgagaggtttactttatgttttaataatgttcttacccttgctgctctctaaactgtaatggcgtacggttagctaaactaaagtaaaaatcgattcgcttgagtaaaattagtgaccgggaaagatcatcgactactactgctcagagatgtaatcggtaattaagacttcaagctcaataattaattaggagtaaatctggcttcgaatttttaaattgtcaacttccaaagaaggattggcaagactcaatctcaattgcccaacaaacatatggctctttacaaatttggaatctctttttgatggcaagaacgtcgtaattcctctgtcgatctcatgtaattaccaaactcatctacttattactttctttatatgcacttactgatgcggccgcttaattaatctgacctgaccactagacctgagtgagtacagatgtgctactagtgctagcctcgaggtcgaccaacttttctatacaaagttgtctagacctaggactaggcactgagtgactcactgacctgactgagtgactggcggccgcagcttatagtaaagatttttttgttaataaaatgaaagttaatatttatggatttatttgaacatatttacaagtttttgttaataaatttatttacagaagtgttaaatttgaaaatgtgttaaatgagagttaatatttatggatataatattactttatttaaaaataaaatgaatttatattaaaatatgatttggtaaaagatattataaagaggaacttggatgagaaagacgacgatgggcaaaagttgcatggcacaccgcttttgttcagtaacatctgcactgtggcgcctttttcacactcaccatgcatgctgccacgtcagctttcacactatgacaccactggccatacacgttgccacctcagctttctcctcttctcactatgacacgactggccatgcatgcatgcatgctgccacctcagctcccgcctcttcacccgtgtctttctctcatgtcgcagtgctgcgtgccaacctcttctctctataaatagagagaagagaatgatggttaaactcaaaccaaaacaagaaaacatacacaaatagcaaaacggatccacaaccaaaaatggcttcctctatgctctcttccgctactatggttgcctctccggctcaggccactatggtcgctcctttcaacggacttaagtcctccgctgccttcccagccacccgcaaggctaacaacgacattacttccatcacaagcaacggcggaagagttaactgcatgcaggtgtggcctccgattggaaagaagaagtttgagactctctcttaccttcctgaccttaccgattccgaagcgcttcgtgtcaagaccaacaagaagccatgttgggagatgaccaaggaggaactgacctctggcaaaactgaggtgttcaactatgaggaactcctggagtttgcagagggtgacatagctaaggtttttggtccggagtttgctgtcatagacaagtaccccagaagggtgaggctgcctgctcgtgaatacctgcttgtgacaagggtcacactcatggatgccgaggtcaacaactacagagttggtgccagaatggtcactgagtatgatcttccagtgaatggcgaattgtctgagggaggtgattgtccctgggcagttctggttgagagtggacagtgcgatttgatgctgatatcatacatgggaattgatttccagaaccaaggtgacagagtttaccgtctgctcaacaccacgttgacattctatggggttgcccatgagggagagacccttgagtatgacatcagagtgaccggttttgccaaacgtttggatggtggcatctccatgttcttctttgagtatgactgctatgtcaatgggaggcttctcattgagatgagagatggctgtgctggcttcttcacaaatgaggagcttgatgcgggaaagggtgtggtgttcacaagaggggatttggctgccagagctaagattccaaagcaagatgtttctccctatgctgtcgctccctgccttcacaaaacaaaactcaacgaaaaggagatgcagaccttggttgacaaagattgggcttccgtttttggctcaaagaatggcatgccggagatcaactacaaactctgcgcacgtaagatgctcatgattgatagagtcaccagcattgaccataagggaggtgtgtacggtttgggtcagttggttggtgagaaaatcttggagagggaccattggtacttcccatgccattttgttaaggatcaagtcatggctggatctcttgtcagcgacggttgttcacaaatgctcaagatgtacatgatctggctcggtttgcaccttaccaccggaccatttgacttcagacccgtcaacggacacccgaacaaagttaggtgtaggggtcagatatctcctcataagggaaagttggtctacgtcatggagatcaaagagatgggattcgacgaggataacgatccgtacgccattgctgacgtcaacatcattgacgttgatttcgaaaagggtcaagatttcagccttgatagaatcagcgactacggaaagggggatcttaacaaaaagatcgtcgtggacttcaagggcattgctctcaagatgcagaagagatccacgaacaagaacccctccaaagttcagcccgtttttgctaacggtgcagccactgtgggaccggaagcgtccaaggccagctctggtgccagtgctagtgcttctgctgcccctgcgaagcctgctttctcagcagatgttcttgcgccaaagccagttgcacttcctgaacatatcctcaagggtgacgctctcgctccgaaagaaatgtcctggcatcccatgtcaaaacttcctggcaacccgacgccgttcttctcccctagttcttaccctccgagggcaatttgcttcatccctttccctggcaacccacttgacaacaattgcaaagctggagaaatgcctctgaactggtacaacatgtcagagttcatgtgtggaaaagttagcaactgcttgggaccagagttcgcaagatttgataagtcaaatacgagcagaagccctgcttttgatttggctcttgtgactagagttgttgaagtcacaaacatggaacatggcaagttcctgaatgttgattgcaatcccagcaaaggcacaatggtgggggagtttgactgtcctcaagatgcgtggttctttgatggttcttgcaatgatgggcacatgccttattccatcatcatggaaatcggacttcagacatccggtgttctcaccagtgtgttgaaagcaccactgacgatggacaaagatgacattctctttaggaaccttgatgcaagtgctgaaatggtgaggccagatgtggatgtgagggggaaaaccataaggaatgtgaccaagtgcactggatatgcaatgttgggaaagatggggattcacagattcacgtttgagttgtctgttgatggcgtggttttctacaaaggaagcacttcctttggatggttcactccagaggtgtttgctcagcaagctggacttgacaatgggaaaaagacggagccttggtgcaaaactaacaacacgagtgtgagaagagttgaaatcgcatcagccaaaggcaaagaacagctgactgagaaacttccagatgcaactaatgctcaagttctcagaaggtcagaacagtgtgagtatttggattacctcaacattgctcctgattctgggctgcatgggaaaggatatgcgcatggacacaaagatgttaacccacaagactggttcttctcttgtcacttttggtttgatcctgtgatgcctggatctttgggaattgagtcaatgttccagctcattgaggcatttgcggtggaccagaacataccgggagaatacaatgtgagcaatccgacctttgcccatgcccctggaaaaacggcgtggaagtaccgtggtcaattgacaccaaagaaccgtgcgatggactgtgaggtgcacatagtttcaatcacagcctctcctgaaaatggaggctacgttgacatagtggcagatggagcactttgggttgatggtctccgtgtgtatgaagccaaagaactcagagttcgtgttgtcagtgcaaaacctcaagccattccggatgttcaacaacagccacccagcgcaaaagcggaccctgggaaaactggagttgcactcagtccgactcagttgagagatgtcctgcttgaagtggacaatccattgtatcttggtgttgaaaactccaatttggtgcagtttgaatccaaacctgcaacttcttcaaggattgtcagtatcaaaccatgctccataagtgatcttggtgacaagtccttcatggaaacgtacaatgtgtcagcacctctgtacactggagcaatggccaagggaattgcgtctgcggaccttgtcattgctgctgggaagaggaagatattgggttcttttggagcgggtgggcttccaatgcaccatgtgagggcagctttggagaagatacaagcggctctgcctcaaggaccatatgctgtgaacctcattcattcaccttttgacagcaacttggaaaaggggaatgttgatctcttcctcgaaaagggcgttactgtggtggaggcttctgcattcatgaccctcactccccaagttgttcgttaccgtgcagccggactctcaaggaacgctgatgggagtgtcaacatcagaaaccgtatcattggaaaagtgtccagaacagaactcgccgaaatgttcatcagaccggctccggaacacctccttgagaaactcatagcttctggtgagataacacaagaacaagccgaacttgcccgtcgtgttcctgtcgcagacgacatcgctgttgaagctgattctggtggtcacactgacaaccgtcccatccacgtcatcttgcctttgatcatcaaccttaggaacagactgcacagagagtgtggttatcctgcgcaccttagagtcagagttggagctggaggcggtgttggctgcccacaagctgctgcggctgccctcacaatgggagctgccttcatagtgactgggactgtcaatcaagttgctaaacagtccgggacatgtgacaacgtgagaaaacaactcagtcaagccacctacagtgacatttgcatggctccagcagctgatatgtttgaggaaggtgtgaaactccaagttctcaagaagggaacaatgttcccatcaagagctaacaaattgtacgaactcttttgcaagtacgactctttcgattcaatgcctcctgctgaacttgaaaggatcgagaagaggatcttcaagagggcacttcaagaggtctgggaagagaccaaggacttttacatcaatggtttgaagaatccagagaagatacagagagcggaacatgaccccaaactcaagatgtctttgtgtttcagatggtatcttggtcttgcatcacgttgggccaacatgggtgctcctgatcgtgtcatggactatcaagtctggtgtggtccagccattggagccttcaatgacttcatcaaaggaacatatcttgatcctgctgtctctaatgagtacccatgtgttgtccagatcaaccttcagattttgcgtggtgcatgttacctgaggcgtcttaatgctctgagaaatgatccgaggattgatcttgagactgaagatgctgcctttgtctatgagccaacgaatgcgctttgagtagttagcttaatcacttaggtcacccagtccaagcccggcctagcacgatgatcatgagtgttgctattgatgtatgttaatactatacacagtcatcgtgtgtgttttataaaactgtaagcttaggatgtttgaggctaatgtaattagcactacaccgtaataaatgagaggtttactttatgttttaataatgttcttacccttgctgctctctaaactgtaatggcgtacggttagctaaactaaagtaaaaatcgattcgcttgagtaaaattagtgaccgggaaagatcatcgactactactgctcagagatgtaatcggtaattaagacttcaagctcaataattaattaggagtaaatctggcttcgaatttttaaattgtcaacttccaaagaaggattggcaagactcaatctcaattgcccaacaaacatatggctctttacaaatttggaatctctttttgatggcaagaacgtcgtaattcctctgtcgatctcatgtaattaccaaactcatctacttattactttctttatatgcacttactgatgcggccgcttaattaatcacgagtggatgactgtcacgactgactcatgactgactactagtgctagcctcgaggtcgacacaactttgtataataaagttgtctagacctaggagctgtgctgggtaactcacatgagtcactggtcacatcagcggccgcagcttatagtaaagatttttttgttaataaaatgaaagttaatatttatggatttatttgaacatatttacaagtttttgttaataaatttatttacagaagtgttaaatttgaaaatgtgttaaatgagagttaatatttatggatataatattactttatttaaaaataaaatgaatttatattaaaatatgatttggtaaaagatattataaagaggaacttggatgagaaagacgacgatgggcaaaagttgcatggcacaccgcttttgttcagtaacatctgcactgtggcgcctttttcacactcaccatgcatgctgccacgtcagctttcacactatgacaccactggccatacacgttgccacctcagctttctcctcttctcactatgacacgactggccatgcatgcatgcatgctgccacctcagctcccgcctcttcacccgtgtctttctctcatgtcgcagtgctgcgtgccaacctcttctctctataaatagagagaagagaatgatggttaaactcaaaccaaaacaagaaaacatacacaaatagcaaaacggatccacaaccaaaaatggcttcctctatgctctcttccgctactatggttgcctctccggctcaggccactatggtcgctcctttcaacggacttaagtcctccgctgccttcccagccacccgcaaggctaacaacgacattacttccatcacaagcaacggcggaagagttaactgcatgcaggtgtggcctccgattggaaagaagaagtttgagactctctcttaccttcctgaccttaccgattccgaacttcagcacacttggcttccgaagcctcccaatctgaccctcttgtcagatgaggttcatctctggaggattcctcttgaccagcctgagtcacaacttcaagaccttgctgccaccctgagcagtgatgaattggcgagggcaaacagattctactttccagaacacagaaggcgtttcactgctgggagaggcatcctcagatccatcttgggtggatacttgggagtggaaccgggtcaagtcaagtttgattatgagtcccgtgggaaaccgatccttggtgacagatttgctgagagtggactcctgttcaacttgtctcacagccagaaccttgccttgtgtgctgtcaactacacgcgtcaaataggcattgatcttgaatatctgcgtccaacatctgacttggagtctcttgcaaagaggttctttctcccaagagaatatgaactcttgaggtcactccctgatgagcagaaacagaagattttctttcgttactggacttgcaaagaggcttatctcaaagcaacgggagatggaatagccaaacttgaagagatcgagatagcactcaccccaacagaacctgccaagctccaaacagctcctgcgtggtctctgttggagcttgtgccagatgacaattgtgttgcagctgtggctgttgcgggttttggttggcagcccaagttctggcattactgagtagttagcttaatcacttaggtcacccagtccaagcccggcctagcacgatgatcatgagtgttgctattgatgtatgttaatactatacacagtcatcgtgtgtgttttataaaactgtaagcttaggatgtttgaggctaatgtaattagcactacaccgtaataaatgagaggtttactttatgttttaataatgttcttacccttgctgctctctaaactgtaatggcgtacggttagctaaactaaagtaaaaatcgattcgcttgagtaaaattagtgaccgggaaagatcatcgactactactgctcagagatgtaatcggtaattaagacttcaagctcaataattaattaggagtaaatctggcttcgaatttttaaattgtcaacttccaaagaaggattggcaagactcaatctcaattgcccaacaaacatatggctctttacaaatttggaatctctttttgatggcaagaacgtcgtaattcctctgtcgatctcatgtaattaccaaactcatctacttattactttctttatatgcacttactgatgcggccgcttaattaactactgtcactgaggccgtagacgagtacggactgatctaactagtgctagcctcgaggtcgacacccagctttc

SEQ ID NO: 43 - DNA, 39183 bp, Artificial sequence
  plasmid pDAB100518
ttgtacaaagtggttgcggccgcttaattaaatttaaattcaattaatgcaatcttgattttcaacaacgaaggtaatggcgtaaaagaaaaaatgtatgttattgtattgatctttcatgatgttgaagcgtgccataatatgatgatgtataattaaaatattaactgtcgcattttattgaaatggcactgttatttcaaccatatctttgattctgttacatgacacgactgcaagaagtaaataatagacgccgttgttaaagaattgctatcatatgtgcctaactagagggaatttgagcgtcagacctaatcaaatattacaaaatatctcactctgtcgccagcaatggtgtaatcagcgcagacaaatggcgtaaagatcgcggaaaaacctccccgagtggcatgatagctgcctctgtattgctgatttagtcagccttatttgacttaagggtgccctcgttagtgacaaattgctttcaaggagacagccatgccccacactttgttgaaaaacaaattgcctttggggagacggtaaagccagttgctcttcaataaggaatgtcgaggaggcaatgtaaccgcctctggtagtacacttctctaatccaaaaatcaatttgtattcaagataccgcaaaaaacttatggtttaaaccctgcaggactagtccagaaggtaattatccaagatgtagcatcaagaatccaatgtttacgggaaaaactatggaagtattatgtaagctcagcaagaagcagatcaatatgcggcacatatgcaacctatgttcaaaaatgaagaatgtacagatacaagatcctatactgccagaatacgaagaagaatacgtagaaattgaaaaagaagaaccaggcgaagaaaagaatcttgaagacgtaagcactgacgacaacaatgaaaagaagaagataaggtcggtgattgtgaaagagacatagaggacacatgtaaggtggaaaatgtaagggcggaaagtaaccttatcacaaaggaatcttatcccccactacttatccttttatatttttccgtgtcatttttgcccttgagttttcctatataaggaaccaagttcggcatttgtgaaaacaagaaaaaatttggtgtaagctattttctttgaagtactgaggatacaacttcagagaaatttgtaagtttgtaggtaccagatctggatcccaaaccatgtctccggagaggagaccagttgagattaggccagctacagcagctgatatggccgcggtttgtgatatcgttaaccattacattgagacgtctacagtgaactttaggacagagccacaaacaccacaagagtggattgatgatctagagaggttgcaagatagatacccttggttggttgctgaggttgagggtgttgtggctggtattgcttacgctgggccctggaaggctaggaacgcttacgattggacagttgagagtactgtttacgtgtcacataggcatcaaaggttgggcctaggatctacattgtacacacatttgcttaagtctatggaggcgcaaggttttaagtctgtggttgctgttataggccttccaaacgatccatctgttaggttgcatgaggctttgggatacacagcccggggtacattgcgcgcagctggatacaagcatggtggatggcatgatgttggtttttggcaaagggattttgagttgccagctcctccaaggccagttaggccagttacccaaatctgagtagttagcttaatcacctagagctcgatcggcggcaatagcttcttagcgccatcccgggttgatcctatctgtgttgaaatagttgcggtgggcaaggctctctttcagaaagacaggcggccaaaggaacccaaggtgaggtgggctatggctctcagttccttgtggaagcgcttggtctaaggtgcagaggtgttagcgggatgaagcaaaagtgtccgattgtaacaagatatgttgatcctacgtaaggatattaaagtatgtattcatcactaatataatcagtgtattccaatatgtactacgatttccaatgtctttattgtcgccgtatgtaatcggcgtcacaaaataatccccggtgactttcttttaatccaggatgaaataatatgttattataatttttgcgatttggtccgttataggaattgaagtgtgcttgaggtcggtcgccaccactcccatttcataattttacatgtatttgaaaaataaaaatttatggtattcaatttaaacacgtatacttgtaaagaatgatatcttgaaagaaatatagtttaaatatttattgataaaataacaagtcaggtattatagtccaagcaaaaacataaatttattgatgcaagtttaaattcagaaatatttcaataactgattatatcagctggtacattgccgtagatgaaagactgagtgcgatattatggtgtaatacataggaattcgtttaaacgatctgcgtctaattttcggtccaacttgcacaggaaagacgtcgaccgcggtagctcttgcccagcagactgggcttccagtcctttcgctcgatcgggtccaatgttgtcctcagctgtgaaccggaagcggacgaccaacagtggaagaactgaaaggaacgagccgtctataccttgatgatcggcctctggtgaagggtatcatcgcagccaagcaagctcatgaaaggctgatgggggaggtgtataattatgaggcccacggcgggcttattctttagggaggatctatctcgttgctcaagtgcatggcgcaaagcagttattggagtgcggattttcgttggcatattattcgccacgagttagcagacgaagagaccttcatgaacgtggccaaggccagagttaagcagatgttacgccctgctgcaggcctttctattatccaatagttggttgatctttggaaagagcctcggctgaggcccatactgaaagagatcgatggatatcgatatgccatgttgtttgctagccagaaccagatcacatccgatatgctattgcagcttgacgcagatatggaggataagttgattcatgggatcgctcaggagtagctcatccatgcacgccgacaagaacagaaattccgtcgagttaacgcagccgcttacgacggattcgaaggtcatccattcggaatgtattagtttgcaccagctccgcgtcacacctgtcttcatttgaataagatgttagcaattgtttttagctttgtcttgttgtggcagggcggcaagtgcttcagacatcattctgttttcaaattttatgctggagaacagcttcttaattcctttggaaataatagactgcgtcttaaaattcagatgtctggatatagatatgattgtaaaataacctatttaagtgtcatttagaacataagttttatgaatgttcttccattttcgtcatcgaacgaataagagtaaatacaccttttttaacattacaaataagttcttatacgttgtttatacaccgggaatcatttccattattttcgcgcaaaagtcacggatattcgtgaaagcgacataaactgcgaaatttgcggggagtgtcttgagtttgcctcgaggctagcgcatgcacatagacacacacatcatctcattgatgcttggtaataattgtcattagattgtttttatgcatagatgcactcgaaatcagccaattttagacaagtatcaaacggatgtgacttcagtacattaaaaacgtccgcaatgtgttattaagttgtctaagcgtcaatttgatttacaattgaatatatcctgccccagccagccaacagctcgatttacaattgaatatatcctgccggccggcccacgcgtgtcgaggaattctgatctggcccccatttggacgtgaatgtagacacgtcgaaataaagatttccgaattagaataatttgtttattgctttcgcctataaatacgacggatcgtaatttgtcgttttatcaaaatgtactttcattttataataacgctgcggacatctacatttttgaattgaaaaaaaattggtaattactctttctttttctccatattgaccatcatactcattgctgatccatgtagatttcccggacatgaagccatttacaattgaatatatcctgccgccgctgccgctttgcacccggtggagcttgcatgttggtttctacgcagaactgagccggttaggcagataatttccattgagaactgagccatgtgcaccttccccccaacacggtgagcgacggggcaacggagtgatccacatgggacttttaaacatcatccgtcggatggcgttgcgagagaagcagtcgatccgtgagatcagccgacgcaccgggcaggcgcgcaacacgatcgcaaagtatttgaacgcaggtacaatcgagccgacgttcacgcggaacgaccaagcaagcttggctgccatttttggggtgaggccgttcgcggccgaggggcgcagcccctggggggatgggaggcccgcgttagcgggccgggagggttcgagaagggggggcaccccccttcggcgtgcgcggtcacgcgcacagggcgcagccctggttaaaaacaaggtttataaatattggtttaaaagcaggttaaaagacaggttagcggtggccgaaaaacgggcggaaacccttgcaaatgctggattttctgcctgtggacagcccctcaaatgtcaataggtgcgcccctcatctgtcagcactctgcccctcaagtgtcaaggatcgcgcccctcatctgtcagtagtcgcgcccctcaagtgtcaataccgcagggcacttatccccaggcttgtccacatcatctgtgggaaactcgcgtaaaatcaggcgttttcgccgatttgcgaggctggccagctccacgtcgccggccgaaatcgagcctgcccctcatctgtcaacgccgcgccgggtgagtcggcccctcaagtgtcaacgtccgcccctcatctgtcagtgagggccaagttttccgcgaggtatccacaacgccggcggccgcggtgtctcgcacacggcttcgacggcgtttctggcgcgtttgcagggccatagacggccgccagcccagcggcgagggcaaccagcccggtgagcgtcggaaagggtcgacggatcttttccgctgcataaccctgcttcggggtcattatagcgattttttcggtatatccatcctttttcgcacgatatacaggattttgccaaagggttcgtgtagactttccttggtgtatccaacggcgtcagccgggcaggataggtgaagtaggcccacccgcgagcgggtgttccttcttcactgtcccttattcgcacctggcggtgctcaacgggaatcctgctctgcgaggctggccggctaccgccggcgtaacagatgagggcaagcggatggctgatgaaaccaagccaaccaggaagggcagcccacctatcaaggtgtactgccttccagacgaacgaagagcgattgaggaaaaggcggcggcggccggcatgagcctgtcggcctacctgctggccgtcggccagggctacaaaatcacgggcgtcgtggactatgagcacgtccgcgagctggcccgcatcaatggcgacctgggccgcctgggcggcctgctgaaactctggctcaccgacgacccgcgcacggcgcggttcggtgatgccacgatcctcgccctgctggcgaagatcgaagagaagcaggacgagcttggcaaggtcatgatgggcgtggtccgcccgagggcagagccatgacttttttagccgctaaaacggccggggggtgcgcgtgattgccaagcacgtccccatgcgctccatcaagaagagcgacttcgcggagctggtattcgtgcagggcaagattcggaataccaagtacgagaaggacggccagacggtctacgggaccgacttcattgccgataaggtggattatctggacaccaaggcaccaggcgggtcaaatcaggaataagggcacattgccccggcgtgagtcggggcaatcccgcaaggagggtgaatgaatcggacgtttgaccggaaggcatacaggcaagaactgatcgacgcggggttttccgccgaggatgccgaaaccatcgcaagccgcaccgtcatgcgtgcgccccgcgaaaccttccagtccgtcggctcgatggtccagcaagctacggccaagatcgagcgcgacagcgtgcaactggctccccctgccctgcccgcgccatcggccgccgtggagcgttcgcgtcgtctcgaacaggaggcggcaggtttggcgaagtcgatgaccatcgacacgcgaggaactatgacgaccaagaagcgaaaaaccgccggcgaggacctggcaaaacaggtcagcgaggccaagcaggccgcgttgctgaaacacacgaagcagcagatcaaggaaatgcagctttccttgttcgatattgcgccgtggccggacacgatgcgagcgatgccaaacgacacggcccgctctgccctgttcaccacgcgcaacaagaaaatcccgcgcgaggcgctgcaaaacaaggtcattttccacgtcaacaaggacgtgaagatcacctacaccggcgtcgagctgcgggccgacgatgacgaactggtgtggcagcaggtgttggagtacgcgaagcgcacccctatcggcgagccgatcaccttcacgttctacgagctttgccaggacctgggctggtcgatcaatggccggtattacacgaaggccgaggaatgcctgtcgcgcctacaggcgacggcgatgggcttcacgtccgaccgcgttgggcacctggaatcggtgtcgctgctgcaccgcttccgcgtcctggaccgtggcaagaaaacgtcccgttgccaggtcctgatcgacgaggaaatcgtcgtgctgtttgctggcgaccactacacgaaattcatatgggagaagtaccgcaagctgtcgccgacggcccgacggatgttcgactatttcagctcgcaccgggagccgtacccgctcaagctggaaaccttccgcctcatgtgcggatcggattccacccgcgtgaagaagtggcgcgagcaggtcggcgaagcctgcgaagagttgcgaggcagcggcctggtggaacacgcctgggtcaatgatgacctggtgcattgcaaacgctagggccttgtggggtcagttccggctgggggttcagcagccagcgctttactggcatttcaggaacaagcgggcactgctcgacgcacttgcttcgctcagtatcgctcgggacgcacggcgcgctctacgaactgccgataaacagaggattaaaattgacaattgtgattaaggctcagattcgacggcttggagcggccgacgtgcaggatttccgcgagatccgattgtcggccctgaagaaagctccagagatgttcgggtccgtttacgagcacgaggagaaaaagcccatggaggcgttcgctgaacggttgcgagatgccgtggcattcggcgcctacatcgacggcgagatcattgggctgtcggtcttcaaacaggaggacggccccaaggacgctcacaaggcgcatctgtccggcgttttcgtggagcccgaacagcgaggccgaggggtcgccggtatgctgctgcgggcgttgccggcgggtttattgctcgtgatgatcgtccgacagattccaacgggaatctggtggatgcgcatcttcatcctcggcgcacttaatatttcgctattctggagcttgttgtttatttcggtctaccgcctgccgggcggggtcgcggcgacggtaggcgctgtgcagccgctgatggtcgtgttcatctctgccgctctgctaggtagcccgatacgattgatggcggtcctgggggctatttgcggaactgcgggcgtggcgctgttggtgttgacaccaaacgcagcgctagatcctgtcggcgtcgcagcgggcctggcgggggcggtttccatggcgttcggaaccgtgctgacccgcaagtggcaacctcccgtgcctctgctcacctttaccgcctggcaactggcggccggaggacttctgctcgttccagtagctttagtgtttgatccgccaatcccgatgcctacaggaaccaatgttctcggcctggcgtggctcggcctgatcggagcgggtttaacctacttcctttggttccgggggatctcgcgactcgaacctacagttgtttccttactgggctttctcagcccccgagcgcttagtgggaatttgtaccccttatcgaaccgggagcacaggatgacgcctaacaattcattcaagccgacaccgcttcgcggcgcggcttaattcaggagttaaacatcatgagggaagcggtgatcgccgaagtatcgactcaactatcagaggtagttggcgtcatcgagcgccatctcgaaccgacgttgctggccgtacatttgtacggctccgcagtggatggcggcctgaagccacacagtgatattgatttgctggttacggtgaccgtaaggcttgatgaaacaacgcggcgagctttgatcaacgaccttttggaaacttcggcttcccctggagagagcgagattctccgcgctgtagaagtcaccattgttgtgcacgacgacatcattccgtggcgttatccagctaagcgcgaactgcaatttggagaatggcagcgcaatgacattcttgcaggtatcttcgagccagccacgatcgacattgatctggctatcttgctgacaaaagcaagagaacatagcgttgccttggtaggtccagcggcggaggaactctttgatccggttcctgaacaggatctatttgaggcgctaaatgaaaccttaacgctatggaactcgccgcccgactgggctggcgatgagcgaaatgtagtgcttacgttgtcccgcatttggtacagcgcagtaaccggcaaaatcgcgccgaaggatgtcgctgccgactgggcaatggagcgcctgccggcccagtatcagcccgtcatacttgaagctaggcaggcttatcttggacaagaagatcgcttggcctcgcgcgcagatcagttggaagaatttgttcactacgtgaaaggcgagatcaccaaggtagtcggcaaataatgtctaacaattcgttcaagccgacgccgcttcgcggcgcggcttaactcaagcgttagagagctggggaagactatgcgcgatctgttgaaggtggttctaagcctcgtcttgcgatggcatttcgatccattcccattccgcgctcaagatggcttcccctcggcagttcatcagggctaaatcaatctagccgacttgtccggtgaaatgggctgcactccaacagaaacaatcaaacaaacatacacagcgacttattcacacgagctcaaattacaacggtatatatcctgccagtcagcatcatcacaccaaaagttaggcccgaatagtttgaaattagaaagctcgcaattgaggtctacaggccaaattcgctcttagccgtacaatattactcaccggatcctaaccggtttaattaaggcgcgccatgcccgggcaagcggccgcacaagtttgtacaaaaaagcaggcttctagacctaggtggagtcatcacgcagactatctcagcatgtgcgtagcacgcggccgcagcttatagtaaagatttttttgttaataaaatgaaagttaatatttatggatttatttgaacatatttacaagtttttgttaataaatttatttacagaagtgttaaatttgaaaatgtgttaaatgagagttaatatttatggatataatattactttatttaaaaataaaatgaatttatattaaaatatgatttggtaaaagatattataaagaggaacttggatgagaaagacgacgatgggcaaaagttgcatggcacaccgcttttgttcagtaacatctgcactgtggcgcctttttcacactcaccatgcatgctgccacgtcagctttcacactatgacaccactggccatacacgttgccacctcagctttctcctcttctcactatgacacgactggccatgcatgcatgcatgctgccacctcagctcccgcctcttcacccgtgtctttctctcatgtcgcagtgctgcgtgccaacctcttctctctataaatagagagaagagaatgatggttaaactcaaaccaaaacaagaaaacatacacaaatagcaaaacggatccacaaccaaaaatgcttaagctctcttgtaacgttaccaatcatcttcacacattctcattctttagcgattctagtctgttcatccctgtcaacagaaggactcttgctgtgtctatggcagcgaggctgcaagagcagaaaggaggtgagatggacacgaggattgcgatcataggcatgagcgccatacttccttgtggaaccacggtgagagagtcatgggagaccataagggctggcattgattgcctgtctgatcttcctgaggatcgtgttgatgtgactgcgtactttgacccagtcaagaccacaaaggacaaaatctactgcaagagaggaggtttcattcctgagtatgactttgatgcgcgtgagtttggtctcaacatgttccagatggaagattctgatgcgaatcagaccatctcacttctcaaggtcaaagaagcacttcaagatgctgggattgatgcacttggaaaggagaagaaaaacataggatgcgtgcttggcattggaggtggacagaagagttcacatgagttctacagcagactcaactatgtggttgtggagaaagtcttgagaaagatggggatgccagaggaagatgtcaaagtggctgtggagaagtacaaagcgaacttcccagaatggagacttgactctttccctggattccttgggaatgtcactgctggcagatgcaccaacacattcaacttggatggcatgaactgcgttgtggatgctgcatgtgcaagctccttgatagcagtcaaggttgcgattgatgaactgctctatggtgactgcgacatgatggtcactggtgcaacctgcacagacaactccattgggatgtacatggctttctcaaagacacctgtgttcagcacggacccaagtgtgagagcgtatgatgagaaaacgaaagggatgctcattggtgagggatcagccatgttggtgctcaaacgttatgcagatgcagtgagggatggtgatgagattcatgctgtgattcgtggttgtgcaagctcaagtgatggcaaagcagctggcatctacactcccacaatcagtggtcaagaggaagccttgagacgtgcatacaatcgtgcctgcgttgaccctgccactgtcactttggttgagggtcatgggactggcactccagttggagataggattgagttgactgcgttgaggaacttgtttgacaaagcgtatggtgaagggaacacagagaaagttgcagttggaagtatcaagtccagtattggtcatttgaaggctgttgctggtcttgctggaatgatcaaggtcatcatggctctcaaacacaagactttgcctggaacgatcaatgtggacaatccacccaatctctatgacaacactcccatcaatgagtcatccctctacatcaacacgatgaacagaccctggttccctccacctggtgttccgagacgtgctggaatatccagctttggctttggaggtgccaactaccatgcagtgttggaagaggctgaaccagagcacacgacagcgtacagactcaacaaacgtccacaaccggtgttgatgatggctgcaactcctgctgcgttgcagagcctttgtgaagctcagctgaaagagtttgaagctgcgatcaaggagaatgagacagtcaagaatactgcctacatcaagtgtgtcaagtttggagaacagttcaagttccctgggagcatacctgcgaccaatgcgagactgggattcttggtcaaagatgcggaggatgcgtgctccacgcttcgtgctatatgtgctcagtttgccaaagatgtgaccaaagaagcgtggaggcttccgagagaaggagtttctttccgtgccaaaggcattgccaccaatggtgctgttgctgcactcttctctggacaaggtgctcagtacacacacatgttcagtgaagttgcgatgaactggcctcagttcagacagtccattgctgcaatggacgctgcacagtccaaggttgctggaagtgacaaagactttgaaagagtctctcaagtcctgtacccaaggaaaccgtacgaacgtgagccagaacaagatcacaagaaaatctcactcacagcatacagccagccgtcaaccctggcatgtgctcttggtgcctttgagattttcaaggaagctggattcactccagactttgcagctggacacagcttgggtgagtttgctgcgctctatgcagctggttgtgttgacagagatgagttgtttgaacttgtttgcagaagggcaaggatcatgggaggcaaagatgcacctgccacacccaaaggttgcatggcagctgtcataggacccaacgcagagaacatcaaggttcaagctgccaacgtctggcttggaaactcaaactctccgtctcagactgtcattactgggtctgttgaagggattcaagctgaaagtgccagattgcagaaggaagggttcagagttgtgcctcttgcttgtgagtctgccttccattctccacagatggaaaatgccagctcagctttcaaagatgtcatatccaaggtttccttccgtacacccaaagcagaaacaaagctcttcagcaatgtttctggagagacctatccgacggatgccagagagatgctcactcaacacatgacctcatctgtgaagttcctgacccaagtgaggaacatgcaccaagctggtgcgagaatctttgttgagtttggaccgaaacaagttctcagcaaacttgtttctgaaaccctcaaagatgacccgtctgttgtcacagtgtctgtgaacccagcttctggcacggactctgacatacagttgagggatgctgcagttcagctggttgtggctggtgtcaatcttcaagggtttgacaagtgggatgctcctgatgccacgaggatgcaagccatcaagaaaaagagaaccacactcagactttcagctgccacctatgtcagtgacaagaccaagaaagtgagggatgctgccatgaacgacggaagatgtgtcacatacctcaagggtgctgcaccactcatcaaggctcctgaacctgtggttgacgaagctgccaagagggaggctgaaaggcttcagaaggagcttcaagacgctcagaggcagcttgacgacgccaaacgtgcagctgcagaagccaactccaaacttgctgctgccaaggaggaagccaagactgctgcagcttcagccaagcctgcagttgacactgctgttgtggagaaacatcgtgccatcctcaagtccatgctggctgagctggatggttatggaagtgttgatgcttcttcccttcagcaacagcaacagcaacagactgctccggcgcctgttaaagccgctgcccctgccgctcccgttgcaagtgctcctgctcccgccgtgtccaacgagttgcttgagaaagctgagacagttgtgatggaggttctcgctgccaagactggatacgaaacagacatgattgaggcggacatggagcttgagactgagttgggaattgacagcatcaagagggttgaaattctttctgaagtccaagctatgcttaacgttgaggcgaaagatgttgatgctctctctaggacgagaacagtgggtgaagttgtcaacgctatgaaggcagaaatcgctggttcttccgctccggcgccggcagctgccgcacctgcaccggctaaagcggctccagctgcagctgcaccagctgtttctaatgagctgctcgaaaaggcagaaactgttgtgatggaagtccttgctgccaaaactggctacgaaactgacatgatagaatcagacatggagcttgagacggagcttggaattgattccatcaagcgtgtggaaatcctcagtgaagtccaagccatgctcaatgtggaagctaaggatgtggatgctctctcaaggaccagaactgtcggtgaggttgtcaatgccatgaaggctgagatagctggaggctccgctcctgcgccggccgctgccgctcctggtcccgctgccgcggctccagctccagctgcagccgctccggccgtctcaaacgaactccttgaaaaagctgagaccgtcgtgatggaggtcttggcagctaaaaccggctatgagactgacatgattgagtctgacatggaattggagacagaacttgggatagacagcatcaaacgtgttgaaatcctcagtgaggtccaagctatgctgaacgtggaagcgaaggatgttgatgctctgtccagaacgaggaccgttggtgaggttgtggatgccatgaaggctgaaattgctggagggtctgcgcccgcgccagctgcagccgctcctgcacccgcagccgcggcacctgctccagctgcacctgcacctgccgtttcttcagaactcttggagaaggctgagacggttgtgatggaggttttggctgcaaagactggctatgagaccgacatgattgaatctgatatggaattggagacagagcttgggatcgattccatcaaaagagtggagatcctgagtgaagtccaagccatgctcaatgttgaagctaaggatgttgatgcactttcaagaacaaggacagtgggtgaggttgtggatgccatgaaggcggagattgctggagggagcgcgcctgcgccagctgccgcggcacctgcaccggcagccgcagctccagctccagctgcaccagcaccggccgcgcccgcgccagctgtttcatccgaactcctggaaaaggccgagacggttgtgatggaggtgctcgcagctaagactggttacgagaccgacatgattgaaagtgacatggagcttgaaaccgagttgggaatagatagcatcaaacgtgttgaaatcttgtctgaggtccaagctatgttgaacgtggaggcaaaagatgtcgatgcgctttcaagaaccagaacagtcggtgaggtcgtggacgccatgaaggctgaaattgccggaagctctgctagtgcgccagctgcagccgcacctgcacctgctgccgcggcacctgctccagctgcagccgctcctgccgtcagcaatgagttgctggagaaagccgaaacagttgtgatggaagtccttgctgcaaaaactggttacgaaacggacatgattgagtcagacatggaattggagaccgaacttggaatagattccatcaagagagtggagatcctctctgaggtgcaagccatgctcaacgttgaggctaaagatgttgatgcactcagtaggacaagaactgtgggggaagttgtcgatgcgatgaaggctgagattgctggaggctctgctcctgcgccggcagctgccgcacctgcacccgcagccgcggcaccagctgtcagcaacgaattgcttgagaaggctgaaacagttgtcatggaagtgctggctgcaaaaaccggctatgagactgacatgattgagtctgacatggaacttgagacggaattgggcattgacagcatcaagcgtgttgagatcctcagtgaagtccaagcaatgctcaatgtggaggctaaggatgtggatgccctctcaaggaccagaacagttggtgaggtcgttgatgcgatgaaggcggagatcgctggaagttccgcgcctgcgccagctgcagccgctcctgcacccgcagccgcggcaccggctccagctgcagccgcaccggccgtctcctcagaactcctggaaaaggctgagacagttgtgatggaagtccttgctgcgaaaactggctatgagaccgacatgattgaatctgacatggaactggagaccgagcttggaattgactccatcaaacgtgttgaaatcctctctgaggttcaagcgatgttgaatgtggaggccaaagatgttgatgctctttccagaacaaggacggtgggagaggtggttgatgccatgaaggctgagatagctgggggttctgctcctgcgccagctgcagccgctcctgctcccgctgccgcggcaccagctgtcagcaacgaactccttgaaaaagctgaaactgttgtgatggaggttttggctgcaaagactggatacgagactgacatgatagagtcagacatggagttggaaacagagcttgggattgatagcatcaagcgtgtggaaatcctttctgaggttcaagccatgctgaacgttgaggccaaagatgtcgatgctttgtcaaggaccagaacggttggagaagtggtcgatgccatgaaggctgagatagctggtggatcagcccctgctccggctgcagccgctcctgcaagtgccggtgctgcaccagctgtgaagattgattcagttcatggtgctgactgtgacgatttgtcactgatgcacgcaaaggtggttgacatcagaaggccagatgaactgattctggaaagaccggagaaccgtccagttcttgtcgttgacgatggctcagagttgacacttgctcttgtgagggtgttgggagcctgtgcagttgtcttgacctttgagggattgcagttggctcagagagctggtgcagctgccattcgtcatgttctggctaaggacctttcagcagaatcagctgagaaggccatcaaagaggctgagcaaagatttggagcgttgggaggcttcataagccagcaagcagaaaggtttgaaccagctgagatactgggtttcacactcatgtgtgcgaagtttgccaaagcctctctctgcactgctgtggctggaggtcgtcctgccttcatcggtgtggctaggcttgacggcagacttggattcacctctcaaggcacttctgacgcactcaagagagcacagcgtggagcgatctttggactctgcaagacaatagggttggagtggtcagaatctgatgtgttcagccgtggtgtggacattgctcaagggatgcacccagaagatgctgcagttgccatagttagggagatggcgtgtgctgacatcagaatcagagaggttgggattggagcaaaccagcaaagatgcacaatcagagctgccaagttggagactgggaaccctcagagacagatagcgaaagacgatgtgcttctggtttctggaggtgctcgtgggatcacacctctttgcatccgtgagatcacgcgtcagattgctggaggcaagtacattctgttgggtcgtagcaaagtttctgcgtctgaaccagcatggtgtgctggcatcactgatgagaaggctgtgcagaaagctgccacccaagagttgaagagggccttcagtgctggtgaaggacccaaacccactccaagggctgtcacgaaacttgtgggatctgttcttggtgctcgtgaagtgagaagctccattgctgccattgaagctctgggtggcaaagcgatctacagctcttgtgatgtgaactctgctgcagatgttgccaaagcagttagggatgcagagtcccagcttggtgccagagttagtggaatcgttcacgcttctggtgtgctccgtgatcgtctcatagagaagaaactccctgacgagtttgatgctgtctttgggaccaaagtcactgggttggagaatcttctggctgcagttgatcgtgccaacctcaaacacatggttctcttcagctcccttgctggtttccacggcaatgttggtcagtctgactatgcgatggcaaacgaagctctcaacaagatgggtttggaacttgcgaaggatgtcagtgtcaagtccatctgctttggtccctgggatggtgggatggtgacacctcaactcaagaaacagtttcaagaaatgggagttcagatcattcctcgtgaaggaggtgctgatacagttgcgaggattgtgttgggatcaagtcctgctgagatccttgttggaaactggaggacaccatccaagaaagttggaagtgacacgatcaccctgcatagaaagatcagtgccaagtccaatcccttcttggaggatcatgtcatacaaggcagaagggtgttgccaatgacccttgctattgggagccttgctgagacctgccttggactcttccctggctactctctctgggccatagatgacgcacagctcttcaaaggtgtcactgttgatggagacgtcaactgtgaagtgaccctcacaccgtccactgctccgagtgggagggtgaatgtccaagcgacgctcaagacgttctcaagtggaaaacttgttccagcctacagagctgtcatagtgttgtccaaccaaggtgctccacctgccaatgcaaccatgcagcctccgagccttgatgcagatcctgctttgcaagggtcagtctatgatggcaagactctctttcatggtcctgcgttcagaggcattgatgacgttctcagctgcaccaagagccagcttgttgccaagtgttctgctgttcctggatcagatgcagccagaggagagtttgcaactgacactgatgcacatgatccctttgtcaatgatcttgcctttcaagcaatgttggtctgggtgaggagaacgctgggacaagctgcactcccgaactccattcagaggatagtccaacacagaccggtcccacaagacaaacccttctacatcaccctcagatccaatcagagtggtggacatagccagcacaaacatgcacttcagttccacaacgaacaaggtgatctcttcattgatgttcaagcctctgtcattgcgacagactcacttgcgttctgagtagttagcttaatcacttaggtcacccagtccaagcccggcctagcacgatgatcatgagtgttgctattgatgtatgttaatactatacacagtcatcgtgtgtgttttataaaactgtaagcttaggatgtttgaggctaatgtaattagcactacaccgtaataaatgagaggtttactttatgttttaataatgttcttacccttgctgctctctaaactgtaatggcgtacggttagctaaactaaagtaaaaatcgattcgcttgagtaaaattagtgaccgggaaagatcatcgactactactgctcagagatgtaatcggtaattaagacttcaagctcaataattaattaggagtaaatctggcttcgaatttttaaattgtcaacttccaaagaaggattggcaagactcaatctcaattgcccaacaaacatatggctctttacaaatttggaatctctttttgatggcaagaacgtcgtaattcctctgtcgatctcatgtaattaccaaactcatctacttattactttctttatatgcacttactgatgcggccgcttaattaagatgagtgatactcaggactcaggactcactctgctgatcactagtgctagcctcgaggtcgacacaactttgtatacaaaagttgtctagacctaggctcagcaactcatccagtcaagttcgagtcagtgagttgggcggccgcagcttatagtaaagatttttttgttaataaaatgaaagttaatatttatggatttatttgaacatatttacaagtttttgttaataaatttatttacagaagtgttaaatttgaaaatgtgttaaatgagagttaatatttatggatataatattactttatttaaaaataaaatgaatttatattaaaatatgatttggtaaaagatattataaagaggaacttggatgagaaagacgacgatgggcaaaagttgcatggcacaccgcttttgttcagtaacatctgcactgtggcgcctttttcacactcaccatgcatgctgccacgtcagctttcacactatgacaccactggccatacacgttgccacctcagctttctcctcttctcactatgacacgactggccatgcatgcatgcatgctgccacctcagctcccgcctcttcacccgtgtctttctctcatgtcgcagtgctgcgtgccaacctcttctctctataaatagagagaagagaatgatggttaaactcaaaccaaaacaagaaaacatacacaaatagcaaaacggatccacaaccaaaaatgcttaagctctcttgtaacgttaccaatcatcttcacacattctcattctttagcgattctagtctgttcatccctgtcaacagaaggactcttgctgtgtctatggctgcaaggaacgtgagtgcggctcatgagatgcatgacgagaagaggatagctgttgtgggcatggctgttcagtatgctggatgcaaaacgaaagacgagttctgggaagttctcatgaatggaaaagttgagagcaaagtgatcagcgacaaacgtcttggttcaaattaccgtgctgaacactacaaagctgaaaggagcaagtatgctgacaccttctgcaatgagacatatggaactcttgatgagaacgaaatagacaatgagcatgaactccttttgaaccttgccaaacaagccttggctgaaacatctgtcaaagattcaacaagatgtggcatagtttctggatgcctcagcttcccgatggacaacctccaaggtgaactcttgaatgtgtaccagaaccatgttgagaagaaacttggtgccagagttttcaaagatgcctctcactggtcagaaagagaacagtccaacaaaccagaggctggtgacagaagaatcttcatggaccctgcttcctttgttgctgaggaactcaatcttggcgctctccactactctgttgatgctgcctgtgccactgcgctctatgtgctcagactggcgcaagatcacttggtctctggtgcagctgatgtgatgctttgtggtgcaacatgcctgccggagccgtttttcatactctctgggttctcaaccttccaagccatgcctgttggaacgggtcagaatgtgtccatgccgctgcacaaagattctcaaggattgacccctggtgaaggaggttccatcatggtcctcaaacgtttggatgacgcaatcagagatggagatcacatctatggaacacttttgggagccaatgtcagcaacagtggcactggtctgccacttaaaccccttttgccgtcagagaaaaagtgcctcatggacacctacacacgtatcaatgtgcatccccacaagattcagtatgttgaatgccatgcaactgggactccacaaggtgatcgtgtggaaattgatgctgtgaaggcttgctttgaaggcaaagtcccacgttttggaaccacaaaagggaactttggacacacattggtggcagctgggtttgctggcatgtgcaaagtgcttctctccatgaagcacgggatcattccacccactccgggaatagatgacgaaacgaagatggaccctctggttgtctctggtgaggccattccctggccagaaacgaatggagaaccgaagcgtgctggtctctcagcgtttggatttggtgggaccaatgctcatgctgtctttgaggaacatgacccaagcaatgctgcatgcactggccatgactccatttctgctctctctgcacgttgtggtggtgagtcaaacatgagaatagcaatcactgggatggatgccacttttggtgctttgaaaggattggatgcttttgaaagggccatctacactggtgctcatggtgctataccactcccagaaaagagatggagattcctggggaaagacaaggacttccttgatctttgtggagtcaaagcaacaccgcatggctgttacattgaagatgttgaagttgatttccagaggctgaggactccaatgactcctgaagatatgctcttgcctcaacagcttctggctgtcaccacaattgatagggccatattggactctggcatgaagaaaggtggaaatgtggctgtctttgtggggttggggaccgatcttgaactctaccgtcaccgtgcaagggttgctctcaaggagagagtgaggcctgaagccagcaagaaactcaatgacatgatgcagtacatcaatgattgtgggacaagcacttcttacaccagctacataggcaacttggttgcaacaagggtcagttcacaatggggcttcacgggaccttccttcacaatcacagaaggcaacaattctgtgtacagatgtgctgaacttggcaaatacctcttggaaacgggagaggttgatggggttgtggttgcgggtgttgatctctgtgggagtgctgagaacctttacgtcaagtcaaggcgtttcaaggtgtctacatctgacaccccgagagccagctttgatgcagctgctgatggttactttgttggagagggctgtggtgcatttgtgctcaagcgtgagacaagctgcaccaaggatgacagaatctatgcttgcatggatgccatagttcctggaaatgttccatctgcatgtttgagagaggcattggatcaagccagagtcaagcctggagacatcgagatgttggagctttctgctgattcagcgaggcatttgaaggacccgtctgttctcccaaaggaactcactgctgaggaagagattggcggacttcagacgattcttcgtgacgatgacaagctcccaaggaatgttgcaactggaagtgtcaaggccactgttggtgacactggttatgcttctggtgctgccagtttgattaaggctgcgctttgcatctacaaccgttacctgcccagcaatggagatgactgggatgaacctgcacctgaagcaccctgggacagcacactctttgcgtgccagacctcaagagcttggttgaagaaccctggtgagagacgttatgcggctgtttccggagtcagtgaaaccagaagttgctacagtgtgctgctttctgaagcagagggacactacgagagagagaacagaatcagtttggatgaggaagcacccaagctcattgtgttgagagcagactcccatgaagagattcttggaagattggacaagataagggaaaggttcttgcagcccacgggtgctgcacccagagagtctgaattgaaggcgcaagcccgtaggatctttcttgaactccttggtgagacccttgcccaagatgcagcttcatctggaagtcagaagccccttgctctcagcttggtctccactccatccaagctccagagagaggtggaacttgcggcaaaaggcattccgagatgtctcaagatgagacgtgattggagttcccctgctggaagcagatatgcgcctgagcctttggccagtgacagagttgccttcatgtatggagaaggaaggagcccttactatggcatcacacaagacattcataggatttggcctgaacttcatgaggtcatcaatgagaaaacaaaccgtctctgggctgaaggtgacagatgggtcatgccaagggccagcttcaagagtgagcttgagtcacaacagcaagagtttgacagaaacatgattgaaatgttccgtcttggaatcctcacctcaattgccttcacaaacctggcgagagatgttctcaacatcacgcccaaagcagcctttggactcagtttgggagagatttccatgatctttgctttctccaagaaaaacggtttgataagcgatcagttgacaaaggatttgagagagtcagatgtctggaacaaagctctggctgttgagttcaatgcgctcagagaagcctggggcattccacagtctgtcccaaaagatgagttctggcaaggttacatagtgaggggaacgaaacaagacatagaagcagccatagcaccagactcaaagtatgtgaggttgaccatcatcaatgatgccaacactgctctcatcagtggaaagcctgatgcatgcaaagctgcgattgctcgtcttggtggcaacatccctgcgcttccagtcactcaaggcatgtgtgggcattgcccagaggtgggaccttacaccaaggacatcgcaaagatccacgccaaccttgagttccctgtggttgatggtcttgatctctggactaccataaaccagaagaggcttgtgccaagagccacgggtgccaaagatgaatgggctccttcatcctttggggagtatgctggacagctctatgagaaacaagccaacttccctcagatagttgaaaccatctacaagcagaactatgatgtgtttgttgaagttgggccaaacaatcacagaagcacagcagtgagaaccacgcttggaccacagagaaaccaccttgctggtgccatagacaagcagaacgaggatgcttggacgacaatagtcaagctcgtggcttcattgaaggctcaccttgttcctggagtgaccatcagtccgctctaccactccaagctcgttgcagaggctgaggcttgttatgctgcgctctgtaaaggtgagaaacccaagaaaaacaagtttgtgagaaagattcagttgaatggcagattcaacagcaaggcagaccccatctcctcagcagaccttgcatccttcccacctgcggaccctgcgattgaagctgccatctcttcaaggatcatgaagcctgtggctccgaaattctatgcgcgtctcaacattgatgagcaagatgagaccagagatccgatcttgaacaaggacaatgcgccttccagctccagctcttccagcagttcctcttccagcagttcatctccgtctcctgctccttcagctccagttcagaagaaagctgccccagctgcggagacaaaagctgttgccagtgctgatgcacttcgtagtgccctgcttgatcttgactccatgcttgcgctcagctctgcaagtgcttctggcaaccttgttgagactgcgccatctgatgccagtgtcattgtccctccgtgcaacattgctgatcttggcagcagagctttcatgaaaacttatggtgtttctgcgcctctgtacaccggtgcaatggccaagggaattgcctctgcggacttggtgatcgcagctggaaggcaaggaatccttgcgtcatttggtgctggaggccttccaatgcaagttgtgcgtgagtccattgaaaagattcaagctgccctgcccaatggaccatatgctgtcaacctcatccattctccttttgacagcaaccttgagaagggaaatgttgatctcttcttggaaaagggtgtcacttttgttgaggcttcagccttcatgacgttgacaccgcaagttgtcagatacagagcggctgggttgacgaggaatgcagatgggtcagtcaacataaggaacagaatcattgggaaagtctccagaactgagctggctgaaatgttcatgcgtcctgcacctgagcatcttttgcagaagctcattgcttctggggagatcaatcaagaacaagctgagttggccagacgtgttcctgtggctgatgacattgcggttgaagctgattctggtggacacactgacaaccgtccaatccatgtcattctgcctctgattatcaacctgagggataggcttcacagagagtgtggatacccagcaaacctgagggttcgtgttggtgctgggggtggcattgggtgtccccaagctgcgctggcaactttcaacatgggtgcctctttcattgtcactggaacagtgaaccaagttgccaaacaatctgggacgtgtgacaatgtgaggaaacagcttgcgaaagcaacttactcagatgtttgcatggcaccggcagctgacatgtttgaggaaggtgtgaaacttcaagttttgaagaaaggaacaatgttcccttcaagagccaacaaactctatgagttgttctgcaagtatgattcttttgagtccatgcctccagcagagcttgcgagggttgagaaaagaatcttcagtcgtgcattggaagaggtctgggatgagaccaagaacttctacatcaaccgtctccacaacccagagaagatacagagggctgagagggaccccaaactgaagatgtcactgtgtttcagatggtatctgtccctggcttcaaggtgggccaacactggagcttctgacagagtcatggactaccaagtttggtgtggtcctgccattggttcattcaatgatttcatcaaaggaacttaccttgatccggcagtggcaaatgagtacccgtgtgttgtgcagatcaacaaacagattcttagaggagcgtgcttcttgaggcgtcttgaaatactgagaaatgcaaggctttcagatggtgcagctgcacttgtggcgagcattgatgacacatatgtccctgctgagaagctgtgagtagttagcttaatcacttaggtcacccagtccaagcccggcctagcacgatgatcatgagtgttgctattgatgtatgttaatactatacacagtcatcgtgtgtgttttataaaactgtaagcttaggatgtttgaggctaatgtaattagcactacaccgtaataaatgagaggtttactttatgttttaataatgttcttacccttgctgctctctaaactgtaatggcgtacggttagctaaactaaagtaaaaatcgattcgcttgagtaaaattagtgaccgggaaagatcatcgactactactgctcagagatgtaatcggtaattaagacttcaagctcaataattaattaggagtaaatctggcttcgaatttttaaattgtcaacttccaaagaaggattggcaagactcaatctcaattgcccaacaaacatatggctctttacaaatttggaatctctttttgatggcaagaacgtcgtaattcctctgtcgatctcatgtaattaccaaactcatctacttattactttctttatatgcacttactgatgcggccgcttaattaatctgacctgaccactagacctgagtgagtacagatgtgctactagtgctagcctcgaggtcgaccaacttttctatacaaagttgtctagacctaggactaggcactgagtgactcactgacctgactgagtgactggcggccgcagcttatagtaaagatttttttgttaataaaatgaaagttaatatttatggatttatttgaacatatttacaagtttttgttaataaatttatttacagaagtgttaaatttgaaaatgtgttaaatgagagttaatatttatggatataatattactttatttaaaaataaaatgaatttatattaaaatatgatttggtaaaagatattataaagaggaacttggatgagaaagacgacgatgggcaaaagttgcatggcacaccgcttttgttcagtaacatctgcactgtggcgcctttttcacactcaccatgcatgctgccacgtcagctttcacactatgacaccactggccatacacgttgccacctcagctttctcctcttctcactatgacacgactggccatgcatgcatgcatgctgccacctcagctcccgcctcttcacccgtgtctttctctcatgtcgcagtgctgcgtgccaacctcttctctctataaatagagagaagagaatgatggttaaactcaaaccaaaacaagaaaacatacacaaatagcaaaacggatccacaaccaaaaatgcttaagctctcttgtaacgttaccaatcatcttcacacattctcattctttagcgattctagtctgttcatccctgtcaacagaaggactcttgctgtgtctatggcgcttcgtgtcaagaccaacaagaagccatgttgggagatgaccaaggaggaactgacctctggcaaaactgaggtgttcaactatgaggaactcctggagtttgcagagggtgacatagctaaggtttttggtccggagtttgctgtcatagacaagtaccccagaagggtgaggctgcctgctcgtgaatacctgcttgtgacaagggtcacactcatggatgccgaggtcaacaactacagagttggtgccagaatggtcactgagtatgatcttccagtgaatggcgaattgtctgagggaggtgattgtccctgggcagttctggttgagagtggacagtgcgatttgatgctgatatcatacatgggaattgatttccagaaccaaggtgacagagtttaccgtctgctcaacaccacgttgacattctatggggttgcccatgagggagagacccttgagtatgacatcagagtgaccggttttgccaaacgtttggatggtggcatctccatgttcttctttgagtatgactgctatgtcaatgggaggcttctcattgagatgagagatggctgtgctggcttcttcacaaatgaggagcttgatgcgggaaagggtgtggtgttcacaagaggggatttggctgccagagctaagattccaaagcaagatgtttctccctatgctgtcgctccctgccttcacaaaacaaaactcaacgaaaaggagatgcagaccttggttgacaaagattgggcttccgtttttggctcaaagaatggcatgccggagatcaactacaaactctgcgcacgtaagatgctcatgattgatagagtcaccagcattgaccataagggaggtgtgtacggtttgggtcagttggttggtgagaaaatcttggagagggaccattggtacttcccatgccattttgttaaggatcaagtcatggctggatctcttgtcagcgacggttgttcacaaatgctcaagatgtacatgatctggctcggtttgcaccttaccaccggaccatttgacttcagacccgtcaacggacacccgaacaaagttaggtgtaggggtcagatatctcctcataagggaaagttggtctacgtcatggagatcaaagagatgggattcgacgaggataacgatccgtacgccattgctgacgtcaacatcattgacgttgatttcgaaaagggtcaagatttcagccttgatagaatcagcgactacggaaagggggatcttaacaaaaagatcgtcgtggacttcaagggcattgctctcaagatgcagaagagatccacgaacaagaacccctccaaagttcagcccgtttttgctaacggtgcagccactgtgggaccggaagcgtccaaggccagctctggtgccagtgctagtgcttctgctgcccctgcgaagcctgctttctcagcagatgttcttgcgccaaagccagttgcacttcctgaacatatcctcaagggtgacgctctcgctccgaaagaaatgtcctggcatcccatgtcaaaacttcctggcaacccgacgccgttcttctcccctagttcttaccctccgagggcaatttgcttcatccctttccctggcaacccacttgacaacaattgcaaagctggagaaatgcctctgaactggtacaacatgtcagagttcatgtgtggaaaagttagcaactgcttgggaccagagttcgcaagatttgataagtcaaatacgagcagaagccctgcttttgatttggctcttgtgactagagttgttgaagtcacaaacatggaacatggcaagttcctgaatgttgattgcaatcccagcaaaggcacaatggtgggggagtttgactgtcctcaagatgcgtggttctttgatggttcttgcaatgatgggcacatgccttattccatcatcatggaaatcggacttcagacatccggtgttctcaccagtgtgttgaaagcaccactgacgatggacaaagatgacattctctttaggaaccttgatgcaagtgctgaaatggtgaggccagatgtggatgtgagggggaaaaccataaggaatgtgaccaagtgcactggatatgcaatgttgggaaagatggggattcacagattcacgtttgagttgtctgttgatggcgtggttttctacaaaggaagcacttcctttggatggttcactccagaggtgtttgctcagcaagctggacttgacaatgggaaaaagacggagccttggtgcaaaactaacaacacgagtgtgagaagagttgaaatcgcatcagccaaaggcaaagaacagctgactgagaaacttccagatgcaactaatgctcaagttctcagaaggtcagaacagtgtgagtatttggattacctcaacattgctcctgattctgggctgcatgggaaaggatatgcgcatggacacaaagatgttaacccacaagactggttcttctcttgtcacttttggtttgatcctgtgatgcctggatctttgggaattgagtcaatgttccagctcattgaggcatttgcggtggaccagaacataccgggagaatacaatgtgagcaatccgacctttgcccatgcccctggaaaaacggcgtggaagtaccgtggtcaattgacaccaaagaaccgtgcgatggactgtgaggtgcacatagtttcaatcacagcctctcctgaaaatggaggctacgttgacatagtggcagatggagcactttgggttgatggtctccgtgtgtatgaagccaaagaactcagagttcgtgttgtcagtgcaaaacctcaagccattccggatgttcaacaacagccacccagcgcaaaagcggaccctgggaaaactggagttgcactcagtccgactcagttgagagatgtcctgcttgaagtggacaatccattgtatcttggtgttgaaaactccaatttggtgcagtttgaatccaaacctgcaacttcttcaaggattgtcagtatcaaaccatgctccataagtgatcttggtgacaagtccttcatggaaacgtacaatgtgtcagcacctctgtacactggagcaatggccaagggaattgcgtctgcggaccttgtcattgctgctgggaagaggaagatattgggttcttttggagcgggtgggcttccaatgcaccatgtgagggcagctttggagaagatacaagcggctctgcctcaaggaccatatgctgtgaacctcattcattcaccttttgacagcaacttggaaaaggggaatgttgatctcttcctcgaaaagggcgttactgtggtggaggcttctgcattcatgaccctcactccccaagttgttcgttaccgtgcagccggactctcaaggaacgctgatgggagtgtcaacatcagaaaccgtatcattggaaaagtgtccagaacagaactcgccgaaatgttcatcagaccggctccggaacacctccttgagaaactcatagcttctggtgagataacacaagaacaagccgaacttgcccgtcgtgttcctgtcgcagacgacatcgctgttgaagctgattctggtggtcacactgacaaccgtcccatccacgtcatcttgcctttgatcatcaaccttaggaacagactgcacagagagtgtggttatcctgcgcaccttagagtcagagttggagctggaggcggtgttggctgcccacaagctgctgcggctgccctcacaatgggagctgccttcatagtgactgggactgtcaatcaagttgctaaacagtccgggacatgtgacaacgtgagaaaacaactcagtcaagccacctacagtgacatttgcatggctccagcagctgatatgtttgaggaaggtgtgaaactccaagttctcaagaagggaacaatgttcccatcaagagctaacaaattgtacgaactcttttgcaagtacgactctttcgattcaatgcctcctgctgaacttgaaaggatcgagaagaggatcttcaagagggcacttcaagaggtctgggaagagaccaaggacttttacatcaatggtttgaagaatccagagaagatacagagagcggaacatgaccccaaactcaagatgtctttgtgtttcagatggtatcttggtcttgcatcacgttgggccaacatgggtgctcctgatcgtgtcatggactatcaagtctggtgtggtccagccattggagccttcaatgacttcatcaaaggaacatatcttgatcctgctgtctctaatgagtacccatgtgttgtccagatcaaccttcagattttgcgtggtgcatgttacctgaggcgtcttaatgctctgagaaatgatccgaggattgatcttgagactgaagatgctgcctttgtctatgagccaacgaatgcgctttgagtagttagcttaatcacttaggtcacccagtccaagcccggcctagcacgatgatcatgagtgttgctattgatgtatgttaatactatacacagtcatcgtgtgtgttttataaaactgtaagcttaggatgtttgaggctaatgtaattagcactacaccgtaataaatgagaggtttactttatgttttaataatgttcttacccttgctgctctctaaactgtaatggcgtacggttagctaaactaaagtaaaaatcgattcgcttgagtaaaattagtgaccgggaaagatcatcgactactactgctcagagatgtaatcggtaattaagacttcaagctcaataattaattaggagtaaatctggcttcgaatttttaaattgtcaacttccaaagaaggattggcaagactcaatctcaattgcccaacaaacatatggctctttacaaatttggaatctctttttgatggcaagaacgtcgtaattcctctgtcgatctcatgtaattaccaaactcatctacttattactttctttatatgcacttactgatgcggccgcttaattaatcacgagtggatgactgtcacgactgactcatgactgactactagtgctagcctcgaggtcgacacaactttgtataataaagttgtctagacctaggcgagtcatgagtcgtgacatgacgtcatgctcatcagactgcggccgcagcttatagtaaagatttttttgttaataaaatgaaagttaatatttatggatttatttgaacatatttacaagtttttgttaataaatttatttacagaagtgttaaatttgaaaatgtgttaaatgagagttaatatttatggatataatattactttatttaaaaataaaatgaatttatattaaaatatgatttggtaaaagatattataaagaggaacttggatgagaaagacgacgatgggcaaaagttgcatggcacaccgcttttgttcagtaacatctgcactgtggcgcctttttcacactcaccatgcatgctgccacgtcagctttcacactatgacaccactggccatacacgttgccacctcagctttctcctcttctcactatgacacgactggccatgcatgcatgcatgctgccacctcagctcccgcctcttcacccgtgtctttctctcatgtcgcagtgctgcgtgccaacctcttctctctataaatagagagaagagaatgatggttaaactcaaaccaaaacaagaaaacatacacaaatagcaaaacggatccacaaccaaaaatgcccactccagatgccactgcgcctctcaacaagccgtcagactatgctgtgtaccacgaagaggatggtcctttctggactgctgattcctctggtgtcagcagagtgaacttctctgaaactggtgtgggatctgaaggtgtcattcctgcgctcacactgattgatgtgtttgagcgtgcggtcaaacgtggtggcaataggattgcattcagaacagagaacatgccaaccttgaggcgtggagaagaggctcctgatgctttgccgctcaaagattggaagtcctggtcttggaaacagtacaaagctgatgttcacagaattgcgagggctctgatggatttgggagttgagcagcacgatgcggtctccatctttggcttcaactcaccagaatggttcctcagtgctgtcggtgcagttcatgctggtgccaagatcgctggaatctacccttcagacactcctgctcaagtgcagtacaaagccttccactctgacactgctgttgcagttgtggagaacgaacagtgcttcaagaaattcgcagaggtggttgaggatctcccttacctcaaagccattgtttgttgggattatgaagccacagacatcacaagggaagatggttcagtggttgaagtcctgacctttgctgagttcctgaagagaggtgacactgtggaagcagctgcacttgatgagagaatcagcaagattgagcccaccatgtgtgctgccctgatctacaccagtggcacaactgggagacccaaagctgtcatgatctcccatgacaaccttgtctttgaagcatctgctgtggtcccgaacttgggaggggcatgcacgaccactgctgaggaaaggattctttcctaccttcctttgtctcatgttgctggaatgatggttgacatcattgctccaatcatagcgacagcgttccacaaaggaaggatctgtgtttgttttgccagaccgtatgatttgagaactggaacccttgggcaaagactcaatgcagtggagccaaccatattccttggtgtgccacgtgtgtgggaaaagatccaagagaaattgatggctgttggtgccaaaaccactggtctcaagaagaaactcagcacggcagccaagaaacgtgggcttgaatttcaagaggaacaacagatagggagaagtggtgccaaccctggctttggaccgcttggaatctacaagaaacttttgggcctcatcaaaggaaagttggggctgaccaaatgcaagtttgcctttgctggcgcagctccaatgacccgtgaaacccttcagtactttggagcgctgaacatcaacatcaatgaggtctatggaatgtctgaatgcagtggggctgccacctggtcaactgacaaagctcatgagtggggcactgttggctatgagatgccctcctgtgaagtcagagtgttcaagattgcggaggatggcaccaagacagagtgcccaagagctgctgacatcatgcatgccacagaagaggaacaaggtgaagtttgcttccgtggaaggaacatcatgatgggatacttggccaacccgaaacttggtgatgaccatgttgctgagattgaagagaagaatgcagctgccatagatagcgaagggtggcttcactctggtgacaagggagcaatttccacaaggggaatgctcaagataacgggcagatacaaggagcttatcataggtgctggtggggagaatgtggctcctgttcccattgaagatgccatcaaggcgaggatgccttttgtttcaaatgcaatgatggttggagacaagaggaagttcatggctgtccttctgactttgaaaacggttggagcaactggagagcttcctggcacaaacaagctcatgggagcagctgcggactatggtgagaccattgaggatgcctgtgacaatgaggcgctcattgaagagataacgcagcaactcaaagagataggtgacgatggagatgtcacgccaagcaatgcagcccgtatacaaaagttcacgattttgccactcgacttcagtgtctccacagatgaactgacagcaacgttgaaattgaagagaagtgtggttgcagacaagtatgaggacatcatagaggctttctatgagagcaagtctgtctttgtgccttactcaacagttggagcttatgcaacgggtggaccagttgatgactctgttgtggatggatcattcaaaggtgactttagcatgattggggatgacgatccggatcttcagaatgtggatgtccttgaagcaattgatgaggacaactgagtagttagcttaatcacttaggtcacccagtccaagcccggcctagcacgatgatcatgagtgttgctattgatgtatgttaatactatacacagtcatcgtgtgtgttttataaaactgtaagcttaggatgtttgaggctaatgtaattagcactacaccgtaataaatgagaggtttactttatgttttaataatgttcttacccttgctgctctctaaactgtaatggcgtacggttagctaaactaaagtaaaaatcgattcgcttgagtaaaattagtgaccgggaaagatcatcgactactactgctcagagatgtaatcggtaattaagacttcaagctcaataattaattaggagtaaatctggcttcgaatttttaaattgtcaacttccaaagaaggattggcaagactcaatctcaattgcccaacaaacatatggctctttacaaatttggaatctctttttgatggcaagaacgtcgtaattcctctgtcgatctcatgtaattaccaaactcatctacttattactttctttatatgcacttactgatgcggccgcttaattaatctgatcatggatgctacgtcacggcagtacaggactatcactagacctaggagctgtgctgggtaactcacatgagtcactggtcacatcagcggccgcagcttatagtaaagatttttttgttaataaaatgaaagttaatatttatggatttatttgaacatatttacaagtttttgttaataaatttatttacagaagtgttaaatttgaaaatgtgttaaatgagagttaatatttatggatataatattactttatttaaaaataaaatgaatttatattaaaatatgatttggtaaaagatattataaagaggaacttggatgagaaagacgacgatgggcaaaagttgcatggcacaccgcttttgttcagtaacatctgcactgtggcgcctttttcacactcaccatgcatgctgccacgtcagctttcacactatgacaccactggccatacacgttgccacctcagctttctcctcttctcactatgacacgactggccatgcatgcatgcatgctgccacctcagctcccgcctcttcacccgtgtctttctctcatgtcgcagtgctgcgtgccaacctcttctctctataaatagagagaagagaatgatggttaaactcaaaccaaaacaagaaaacatacacaaatagcaaaacggatccacaaccaaaaatgcttaagctctcttgtaacgttaccaatcatcttcacacattctcattctttagcgattctagtctgttcatccctgtcaacagaaggactcttgctgtgtctatgcttcagcacacttggcttccgaagcctcccaatctgaccctcttgtcagatgaggttcatctctggaggattcctcttgaccagcctgagtcacaacttcaagaccttgctgccaccctgagcagtgatgaattggcgagggcaaacagattctactttccagaacacagaaggcgtttcactgctgggagaggcatcctcagatccatcttgggtggatacttgggagtggaaccgggtcaagtcaagtttgattatgagtcccgtgggaaaccgatccttggtgacagatttgctgagagtggactcctgttcaacttgtctcacagccagaaccttgccttgtgtgctgtcaactacacgcgtcaaataggcattgatcttgaatatctgcgtccaacatctgacttggagtctcttgcaaagaggttctttctcccaagagaatatgaactcttgaggtcactccctgatgagcagaaacagaagattttctttcgttactggacttgcaaagaggcttatctcaaagcaacgggagatggaatagccaaacttgaagagatcgagatagcactcaccccaacagaacctgccaagctccaaacagctcctgcgtggtctctgttggagcttgtgccagatgacaattgtgttgcagctgtggctgttgcgggttttggttggcagcccaagttctggcattactgagtagttagcttaatcacttaggtcacccagtccaagcccggcctagcacgatgatcatgagtgttgctattgatgtatgttaatactatacacagtcatcgtgtgtgttttataaaactgtaagcttaggatgtttgaggctaatgtaattagcactacaccgtaataaatgagaggtttactttatgttttaataatgttcttacccttgctgctctctaaactgtaatggcgtacggttagctaaactaaagtaaaaatcgattcgcttgagtaaaattagtgaccgggaaagatcatcgactactactgctcagagatgtaatcggtaattaagacttcaagctcaataattaattaggagtaaatctggcttcgaatttttaaattgtcaacttccaaagaaggattggcaagactcaatctcaattgcccaacaaacatatggctctttacaaatttggaatctctttttgatggcaagaacgtcgtaattcctctgtcgatctcatgtaattaccaaactcatctacttattactttctttatatgcacttactgatgcggccgcttaattaactactgtcactgaggccgtagacgagtacggactgatctaactagtgctagcctcgaggtcgacacccagctttc

SEQ ID NO: 44 - DNA, 38742 bp, Artificial sequence
  plasmid pDAB101476
aattacaacggtatatatcctgccagtcagcatcatcacaccaaaagttaggcccgaatagtttgaaattagaaagctcgcaattgaggtctacaggccaaattcgctcttagccgtacaatattactcaccggatcctaaccggtttaattaaggcgcgccatgcccgggcaagcggccgcacaagtttgtacaaaaaagcaggcttctagacctaggtggagtcatcacgcagactatctcagcatgtgcgtagcacgcggccgcagcttatagtaaagatttttttgttaataaaatgaaagttaatatttatggatttatttgaacatatttacaagtttttgttaataaatttatttacagaagtgttaaatttgaaaatgtgttaaatgagagttaatatttatggatataatattactttatttaaaaataaaatgaatttatattaaaatatgatttggtaaaagatattataaagaggaacttggatgagaaagacgacgatgggcaaaagttgcatggcacaccgcttttgttcagtaacatctgcactgtggcgcctttttcacactcaccatgcatgctgccacgtcagctttcacactatgacaccactggccatacacgttgccacctcagctttctcctcttctcactatgacacgactggccatgcatgcatgcatgctgccacctcagctcccgcctcttcacccgtgtctttctctcatgtcgcagtgctgcgtgccaacctcttctctctataaatagagagaagagaatgatggttaaactcaaaccaaaacaagaaaacatacacaaatagcaaaacggatccacaaccaaaaatggcagcgaggctgcaagagcagaaaggaggtgagatggacacgaggattgcgatcataggcatgagcgccatacttccttgtggaaccacggtgagagagtcatgggagaccataagggctggcattgattgcctgtctgatcttcctgaggatcgtgttgatgtgactgcgtactttgacccagtcaagaccacaaaggacaaaatctactgcaagagaggaggtttcattcctgagtatgactttgatgcgcgtgagtttggtctcaacatgttccagatggaagattctgatgcgaatcagaccatctcacttctcaaggtcaaagaagcacttcaagatgctgggattgatgcacttggaaaggagaagaaaaacataggatgcgtgcttggcattggaggtggacagaagagttcacatgagttctacagcagactcaactatgtggttgtggagaaagtcttgagaaagatggggatgccagaggaagatgtcaaagtggctgtggagaagtacaaagcgaacttcccagaatggagacttgactctttccctggattccttgggaatgtcactgctggcagatgcaccaacacattcaacttggatggcatgaactgcgttgtggatgctgcatgtgcaagctccttgatagcagtcaaggttgcgattgatgaactgctctatggtgactgcgacatgatggtcactggtgcaacctgcacagacaactccattgggatgtacatggctttctcaaagacacctgtgttcagcacggacccaagtgtgagagcgtatgatgagaaaacgaaagggatgctcattggtgagggatcagccatgttggtgctcaaacgttatgcagatgcagtgagggatggtgatgagattcatgctgtgattcgtggttgtgcaagctcaagtgatggcaaagcagctggcatctacactcccacaatcagtggtcaagaggaagccttgagacgtgcatacaatcgtgcctgcgttgaccctgccactgtcactttggttgagggtcatgggactggcactccagttggagataggattgagttgactgcgttgaggaacttgtttgacaaagcgtatggtgaagggaacacagagaaagttgcagttggaagtatcaagtccagtattggtcatttgaaggctgttgctggtcttgctggaatgatcaaggtcatcatggctctcaaacacaagactttgcctggaacgatcaatgtggacaatccacccaatctctatgacaacactcccatcaatgagtcatccctctacatcaacacgatgaacagaccctggttccctccacctggtgttccgagacgtgctggaatatccagctttggctttggaggtgccaactaccatgcagtgttggaagaggctgaaccagagcacacgacagcgtacagactcaacaaacgtccacaaccggtgttgatgatggctgcaactcctgctgcgttgcagagcctttgtgaagctcagctgaaagagtttgaagctgcgatcaaggagaatgagacagtcaagaatactgcctacatcaagtgtgtcaagtttggagaacagttcaagttccctgggagcatacctgcgaccaatgcgagactgggattcttggtcaaagatgcggaggatgcgtgctccacgcttcgtgctatatgtgctcagtttgccaaagatgtgaccaaagaagcgtggaggcttccgagagaaggagtttctttccgtgccaaaggcattgccaccaatggtgctgttgctgcactcttctctggacaaggtgctcagtacacacacatgttcagtgaagttgcgatgaactggcctcagttcagacagtccattgctgcaatggacgctgcacagtccaaggttgctggaagtgacaaagactttgaaagagtctctcaagtcctgtacccaaggaaaccgtacgaacgtgagccagaacaagatcacaagaaaatctcactcacagcatacagccagccgtcaaccctggcatgtgctcttggtgcctttgagattttcaaggaagctggattcactccagactttgcagctggacacagcttgggtgagtttgctgcgctctatgcagctggttgtgttgacagagatgagttgtttgaacttgtttgcagaagggcaaggatcatgggaggcaaagatgcacctgccacacccaaaggttgcatggcagctgtcataggacccaacgcagagaacatcaaggttcaagctgccaacgtctggcttggaaactcaaactctccgtctcagactgtcattactgggtctgttgaagggattcaagctgaaagtgccagattgcagaaggaagggttcagagttgtgcctcttgcttgtgagtctgccttccattctccacagatggaaaatgccagctcagctttcaaagatgtcatatccaaggtttccttccgtacacccaaagcagaaacaaagctcttcagcaatgtttctggagagacctatccgacggatgccagagagatgctcactcaacacatgacctcatctgtgaagttcctgacccaagtgaggaacatgcaccaagctggtgcgagaatctttgttgagtttggaccgaaacaagttctcagcaaacttgtttctgaaaccctcaaagatgacccgtctgttgtcacagtgtctgtgaacccagcttctggcacggactctgacatacagttgagggatgctgcagttcagctggttgtggctggtgtcaatcttcaagggtttgacaagtgggatgctcctgatgccacgaggatgcaagccatcaagaaaaagagaaccacactcagactttcagctgccacctatgtcagtgacaagaccaagaaagtgagggatgctgccatgaacgacggaagatgtgtcacatacctcaagggtgctgcaccactcatcaaggctcctgaacctgtggttgacgaagctgccaagagggaggctgaaaggcttcagaaggagcttcaagacgctcagaggcagcttgacgacgccaaacgtgcagctgcagaagccaactccaaacttgctgctgccaaggaggaagccaagactgctgcagcttcagccaagcctgcagttgacactgctgttgtggagaaacatcgtgccatcctcaagtccatgctggctgagctggatggttatggaagtgttgatgcttcttcccttcagcaacagcaacagcaacagactgctccggcgcctgttaaagccgctgcccctgccgctcccgttgcaagtgctcctgctcccgccgtgtccaacgagttgcttgagaaagctgagacagttgtgatggaggttctcgctgccaagactggatacgaaacagacatgattgaggcggacatggagcttgagactgagttgggaattgacagcatcaagagggttgaaattctttctgaagtccaagctatgcttaacgttgaggcgaaagatgttgatgctctctctaggacgagaacagtgggtgaagttgtcaacgctatgaaggcagaaatcgctggttcttccgctccggcgccggcagctgccgcacctgcaccggctaaagcggctccagctgcagctgcaccagctgtttctaatgagctgctcgaaaaggcagaaactgttgtgatggaagtccttgctgccaaaactggctacgaaactgacatgatagaatcagacatggagcttgagacggagcttggaattgattccatcaagcgtgtggaaatcctcagtgaagtccaagccatgctcaatgtggaagctaaggatgtggatgctctctcaaggaccagaactgtcggtgaggttgtcaatgccatgaaggctgagatagctggaggctccgctcctgcgccggccgctgccgctcctggtcccgctgccgcggctccagctccagctgcagccgctccggccgtctcaaacgaactccttgaaaaagctgagaccgtcgtgatggaggtcttggcagctaaaaccggctatgagactgacatgattgagtctgacatggaattggagacagaacttgggatagacagcatcaaacgtgttgaaatcctcagtgaggtccaagctatgctgaacgtggaagcgaaggatgttgatgctctgtccagaacgaggaccgttggtgaggttgtggatgccatgaaggctgaaattgctggagggtctgcgcccgcgccagctgcagccgctcctgcacccgcagccgcggcacctgctccagctgcacctgcacctgccgtttcttcagaactcttggagaaggctgagacggttgtgatggaggttttggctgcaaagactggctatgagaccgacatgattgaatctgatatggaattggagacagagcttgggatcgattccatcaaaagagtggagatcctgagtgaagtccaagccatgctcaatgttgaagctaaggatgttgatgcactttcaagaacaaggacagtgggtgaggttgtggatgccatgaaggcggagattgctggagggagcgcgcctgcgccagctgccgcggcacctgcaccggcagccgcagctccagctccagctgcaccagcaccggccgcgcccgcgccagctgtttcatccgaactcctggaaaaggccgagacggttgtgatggaggtgctcgcagctaagactggttacgagaccgacatgattgaaagtgacatggagcttgaaaccgagttgggaatagatagcatcaaacgtgttgaaatcttgtctgaggtccaagctatgttgaacgtggaggcaaaagatgtcgatgcgctttcaagaaccagaacagtcggtgaggtcgtggacgccatgaaggctgaaattgccggaagctctgctagtgcgccagctgcagccgcacctgcacctgctgccgcggcacctgctccagctgcagccgctcctgccgtcagcaatgagttgctggagaaagccgaaacagttgtgatggaagtccttgctgcaaaaactggttacgaaacggacatgattgagtcagacatggaattggagaccgaacttggaatagattccatcaagagagtggagatcctctctgaggtgcaagccatgctcaacgttgaggctaaagatgttgatgcactcagtaggacaagaactgtgggggaagttgtcgatgcgatgaaggctgagattgctggaggctctgctcctgcgccggcagctgccgcacctgcacccgcagccgcggcaccagctgtcagcaacgaattgcttgagaaggctgaaacagttgtcatggaagtgctggctgcaaaaaccggctatgagactgacatgattgagtctgacatggaacttgagacggaattgggcattgacagcatcaagcgtgttgagatcctcagtgaagtccaagcaatgctcaatgtggaggctaaggatgtggatgccctctcaaggaccagaacagttggtgaggtcgttgatgcgatgaaggcggagatcgctggaagttccgcgcctgcgccagctgcagccgctcctgcacccgcagccgcggcaccggctccagctgcagccgcaccggccgtctcctcagaactcctggaaaaggctgagacagttgtgatggaagtccttgctgcgaaaactggctatgagaccgacatgattgaatctgacatggaactggagaccgagcttggaattgactccatcaaacgtgttgaaatcctctctgaggttcaagcgatgttgaatgtggaggccaaagatgttgatgctctttccagaacaaggacggtgggagaggtggttgatgccatgaaggctgagatagctgggggttctgctcctgcgccagctgcagccgctcctgctcccgctgccgcggcaccagctgtcagcaacgaactccttgaaaaagctgaaactgttgtgatggaggttttggctgcaaagactggatacgagactgacatgatagagtcagacatggagttggaaacagagcttgggattgatagcatcaagcgtgtggaaatcctttctgaggttcaagccatgctgaacgttgaggccaaagatgtcgatgctttgtcaaggaccagaacggttggagaagtggtcgatgccatgaaggctgagatagctggtggatcagcccctgctccggctgcagccgctcctgcaagtgccggtgctgcaccagctgtgaagattgattcagttcatggtgctgactgtgacgatttgtcactgatgcacgcaaaggtggttgacatcagaaggccagatgaactgattctggaaagaccggagaaccgtccagttcttgtcgttgacgatggctcagagttgacacttgctcttgtgagggtgttgggagcctgtgcagttgtcttgacctttgagggattgcagttggctcagagagctggtgcagctgccattcgtcatgttctggctaaggacctttcagcagaatcagctgagaaggccatcaaagaggctgagcaaagatttggagcgttgggaggcttcataagccagcaagcagaaaggtttgaaccagctgagatactgggtttcacactcatgtgtgcgaagtttgccaaagcctctctctgcactgctgtggctggaggtcgtcctgccttcatcggtgtggctaggcttgacggcagacttggattcacctctcaaggcacttctgacgcactcaagagagcacagcgtggagcgatctttggactctgcaagacaatagggttggagtggtcagaatctgatgtgttcagccgtggtgtggacattgctcaagggatgcacccagaagatgctgcagttgccatagttagggagatggcgtgtgctgacatcagaatcagagaggttgggattggagcaaaccagcaaagatgcacaatcagagctgccaagttggagactgggaaccctcagagacagatagcgaaagacgatgtgcttctggtttctggaggtgctcgtgggatcacacctctttgcatccgtgagatcacgcgtcagattgctggaggcaagtacattctgttgggtcgtagcaaagtttctgcgtctgaaccagcatggtgtgctggcatcactgatgagaaggctgtgcagaaagctgccacccaagagttgaagagggccttcagtgctggtgaaggacccaaacccactccaagggctgtcacgaaacttgtgggatctgttcttggtgctcgtgaagtgagaagctccattgctgccattgaagctctgggtggcaaagcgatctacagctcttgtgatgtgaactctgctgcagatgttgccaaagcagttagggatgcagagtcccagcttggtgccagagttagtggaatcgttcacgcttctggtgtgctccgtgatcgtctcatagagaagaaactccctgacgagtttgatgctgtctttgggaccaaagtcactgggttggagaatcttctggctgcagttgatcgtgccaacctcaaacacatggttctcttcagctcccttgctggtttccacggcaatgttggtcagtctgactatgcgatggcaaacgaagctctcaacaagatgggtttggaacttgcgaaggatgtcagtgtcaagtccatctgctttggtccctgggatggtgggatggtgacacctcaactcaagaaacagtttcaagaaatgggagttcagatcattcctcgtgaaggaggtgctgatacagttgcgaggattgtgttgggatcaagtcctgctgagatccttgttggaaactggaggacaccatccaagaaagttggaagtgacacgatcaccctgcatagaaagatcagtgccaagtccaatcccttcttggaggatcatgtcatacaaggcagaagggtgttgccaatgacccttgctattgggagccttgctgagacctgccttggactcttccctggctactctctctgggccatagatgacgcacagctcttcaaaggtgtcactgttgatggagacgtcaactgtgaagtgaccctcacaccgtccactgctccgagtgggagggtgaatgtccaagcgacgctcaagacgttctcaagtggaaaacttgttccagcctacagagctgtcatagtgttgtccaaccaaggtgctccacctgccaatgcaaccatgcagcctccgagccttgatgcagatcctgctttgcaagggtcagtctatgatggcaagactctctttcatggtcctgcgttcagaggcattgatgacgttctcagctgcaccaagagccagcttgttgccaagtgttctgctgttcctggatcagatgcagccagaggagagtttgcaactgacactgatgcacatgatccctttgtcaatgatcttgcctttcaagcaatgttggtctgggtgaggagaacgctgggacaagctgcactcccgaactccattcagaggatagtccaacacagaccggtcccacaagacaaacccttctacatcaccctcagatccaatcagagtggtggacatagccagcacaaacatgcacttcagttccacaacgaacaaggtgatctcttcattgatgttcaagcctctgtcattgcgacagactcacttgcgttctgagtagttagcttaatcacttaggtcacccagtccaagcccggcctagcacgatgatcatgagtgttgctattgatgtatgttaatactatacacagtcatcgtgtgtgttttataaaactgtaagcttaggatgtttgaggctaatgtaattagcactacaccgtaataaatgagaggtttactttatgttttaataatgttcttacccttgctgctctctaaactgtaatggcgtacggttagctaaactaaagtaaaaatcgattcgcttgagtaaaattagtgaccgggaaagatcatcgactactactgctcagagatgtaatcggtaattaagacttcaagctcaataattaattaggagtaaatctggcttcgaatttttaaattgtcaacttccaaagaaggattggcaagactcaatctcaattgcccaacaaacatatggctctttacaaatttggaatctctttttgatggcaagaacgtcgtaattcctctgtcgatctcatgtaattaccaaactcatctacttattactttctttatatgcacttactgatgcggccgcttaattaagatgagtgatactcaggactcaggactcactctgctgatcactagtgctagcctcgaggtcgacacaactttgtatacaaaagttgtctagacctaggctcagcaactcatccagtcaagttcgagtcagtgagttgggcggccgcagcttatagtaaagatttttttgttaataaaatgaaagttaatatttatggatttatttgaacatatttacaagtttttgttaataaatttatttacagaagtgttaaatttgaaaatgtgttaaatgagagttaatatttatggatataatattactttatttaaaaataaaatgaatttatattaaaatatgatttggtaaaagatattataaagaggaacttggatgagaaagacgacgatgggcaaaagttgcatggcacaccgcttttgttcagtaacatctgcactgtggcgcctttttcacactcaccatgcatgctgccacgtcagctttcacactatgacaccactggccatacacgttgccacctcagctttctcctcttctcactatgacacgactggccatgcatgcatgcatgctgccacctcagctcccgcctcttcacccgtgtctttctctcatgtcgcagtgctgcgtgccaacctcttctctctataaatagagagaagagaatgatggttaaactcaaaccaaaacaagaaaacatacacaaatagcaaaacggatccacaaccaaaaatggctgcaaggaacgtgagtgcggctcatgagatgcatgacgagaagaggatagctgttgtgggcatggctgttcagtatgctggatgcaaaacgaaagacgagttctgggaagttctcatgaatggaaaagttgagagcaaagtgatcagcgacaaacgtcttggttcaaattaccgtgctgaacactacaaagctgaaaggagcaagtatgctgacaccttctgcaatgagacatatggaactcttgatgagaacgaaatagacaatgagcatgaactccttttgaaccttgccaaacaagccttggctgaaacatctgtcaaagattcaacaagatgtggcatagtttctggatgcctcagcttcccgatggacaacctccaaggtgaactcttgaatgtgtaccagaaccatgttgagaagaaacttggtgccagagttttcaaagatgcctctcactggtcagaaagagaacagtccaacaaaccagaggctggtgacagaagaatcttcatggaccctgcttcctttgttgctgaggaactcaatcttggcgctctccactactctgttgatgctgcctgtgccactgcgctctatgtgctcagactggcgcaagatcacttggtctctggtgcagctgatgtgatgctttgtggtgcaacatgcctgccggagccgtttttcatactctctgggttctcaaccttccaagccatgcctgttggaacgggtcagaatgtgtccatgccgctgcacaaagattctcaaggattgacccctggtgaaggaggttccatcatggtcctcaaacgtttggatgacgcaatcagagatggagatcacatctatggaacacttttgggagccaatgtcagcaacagtggcactggtctgccacttaaaccccttttgccgtcagagaaaaagtgcctcatggacacctacacacgtatcaatgtgcatccccacaagattcagtatgttgaatgccatgcaactgggactccacaaggtgatcgtgtggaaattgatgctgtgaaggcttgctttgaaggcaaagtcccacgttttggaaccacaaaagggaactttggacacacattggtggcagctgggtttgctggcatgtgcaaagtgcttctctccatgaagcacgggatcattccacccactccgggaatagatgacgaaacgaagatggaccctctggttgtctctggtgaggccattccctggccagaaacgaatggagaaccgaagcgtgctggtctctcagcgtttggatttggtgggaccaatgctcatgctgtctttgaggaacatgacccaagcaatgctgcatgcactggccatgactccatttctgctctctctgcacgttgtggtggtgagtcaaacatgagaatagcaatcactgggatggatgccacttttggtgctttgaaaggattggatgcttttgaaagggccatctacactggtgctcatggtgctataccactcccagaaaagagatggagattcctggggaaagacaaggacttccttgatctttgtggagtcaaagcaacaccgcatggctgttacattgaagatgttgaagttgatttccagaggctgaggactccaatgactcctgaagatatgctcttgcctcaacagcttctggctgtcaccacaattgatagggccatattggactctggcatgaagaaaggtggaaatgtggctgtctttgtggggttggggaccgatcttgaactctaccgtcaccgtgcaagggttgctctcaaggagagagtgaggcctgaagccagcaagaaactcaatgacatgatgcagtacatcaatgattgtgggacaagcacttcttacaccagctacataggcaacttggttgcaacaagggtcagttcacaatggggcttcacgggaccttccttcacaatcacagaaggcaacaattctgtgtacagatgtgctgaacttggcaaatacctcttggaaacgggagaggttgatggggttgtggttgcgggtgttgatctctgtgggagtgctgagaacctttacgtcaagtcaaggcgtttcaaggtgtctacatctgacaccccgagagccagctttgatgcagctgctgatggttactttgttggagagggctgtggtgcatttgtgctcaagcgtgagacaagctgcaccaaggatgacagaatctatgcttgcatggatgccatagttcctggaaatgttccatctgcatgtttgagagaggcattggatcaagccagagtcaagcctggagacatcgagatgttggagctttctgctgattcagcgaggcatttgaaggacccgtctgttctcccaaaggaactcactgctgaggaagagattggcggacttcagacgattcttcgtgacgatgacaagctcccaaggaatgttgcaactggaagtgtcaaggccactgttggtgacactggttatgcttctggtgctgccagtttgattaaggctgcgctttgcatctacaaccgttacctgcccagcaatggagatgactgggatgaacctgcacctgaagcaccctgggacagcacactctttgcgtgccagacctcaagagcttggttgaagaaccctggtgagagacgttatgcggctgtttccggagtcagtgaaaccagaagttgctacagtgtgctgctttctgaagcagagggacactacgagagagagaacagaatcagtttggatgaggaagcacccaagctcattgtgttgagagcagactcccatgaagagattcttggaagattggacaagataagggaaaggttcttgcagcccacgggtgctgcacccagagagtctgaattgaaggcgcaagcccgtaggatctttcttgaactccttggtgagacccttgcccaagatgcagcttcatctggaagtcagaagccccttgctctcagcttggtctccactccatccaagctccagagagaggtggaacttgcggcaaaaggcattccgagatgtctcaagatgagacgtgattggagttcccctgctggaagcagatatgcgcctgagcctttggccagtgacagagttgccttcatgtatggagaaggaaggagcccttactatggcatcacacaagacattcataggatttggcctgaacttcatgaggtcatcaatgagaaaacaaaccgtctctgggctgaaggtgacagatgggtcatgccaagggccagcttcaagagtgagcttgagtcacaacagcaagagtttgacagaaacatgattgaaatgttccgtcttggaatcctcacctcaattgccttcacaaacctggcgagagatgttctcaacatcacgcccaaagcagcctttggactcagtttgggagagatttccatgatctttgctttctccaagaaaaacggtttgataagcgatcagttgacaaaggatttgagagagtcagatgtctggaacaaagctctggctgttgagttcaatgcgctcagagaagcctggggcattccacagtctgtcccaaaagatgagttctggcaaggttacatagtgaggggaacgaaacaagacatagaagcagccatagcaccagactcaaagtatgtgaggttgaccatcatcaatgatgccaacactgctctcatcagtggaaagcctgatgcatgcaaagctgcgattgctcgtcttggtggcaacatccctgcgcttccagtcactcaaggcatgtgtgggcattgcccagaggtgggaccttacaccaaggacatcgcaaagatccacgccaaccttgagttccctgtggttgatggtcttgatctctggactaccataaaccagaagaggcttgtgccaagagccacgggtgccaaagatgaatgggctccttcatcctttggggagtatgctggacagctctatgagaaacaagccaacttccctcagatagttgaaaccatctacaagcagaactatgatgtgtttgttgaagttgggccaaacaatcacagaagcacagcagtgagaaccacgcttggaccacagagaaaccaccttgctggtgccatagacaagcagaacgaggatgcttggacgacaatagtcaagctcgtggcttcattgaaggctcaccttgttcctggagtgaccatcagtccgctctaccactccaagctcgttgcagaggctgaggcttgttatgctgcgctctgtaaaggtgagaaacccaagaaaaacaagtttgtgagaaagattcagttgaatggcagattcaacagcaaggcagaccccatctcctcagcagaccttgcatccttcccacctgcggaccctgcgattgaagctgccatctcttcaaggatcatgaagcctgtggctccgaaattctatgcgcgtctcaacattgatgagcaagatgagaccagagatccgatcttgaacaaggacaatgcgccttccagctccagctcttccagcagttcctcttccagcagttcatctccgtctcctgctccttcagctccagttcagaagaaagctgccccagctgcggagacaaaagctgttgccagtgctgatgcacttcgtagtgccctgcttgatcttgactccatgcttgcgctcagctctgcaagtgcttctggcaaccttgttgagactgcgccatctgatgccagtgtcattgtccctccgtgcaacattgctgatcttggcagcagagctttcatgaaaacttatggtgtttctgcgcctctgtacaccggtgcaatggccaagggaattgcctctgcggacttggtgatcgcagctggaaggcaaggaatccttgcgtcatttggtgctggaggccttccaatgcaagttgtgcgtgagtccattgaaaagattcaagctgccctgcccaatggaccatatgctgtcaacctcatccattctccttttgacagcaaccttgagaagggaaatgttgatctcttcttggaaaagggtgtcacttttgttgaggcttcagccttcatgacgttgacaccgcaagttgtcagatacagagcggctgggttgacgaggaatgcagatgggtcagtcaacataaggaacagaatcattgggaaagtctccagaactgagctggctgaaatgttcatgcgtcctgcacctgagcatcttttgcagaagctcattgcttctggggagatcaatcaagaacaagctgagttggccagacgtgttcctgtggctgatgacattgcggttgaagctgattctggtggacacactgacaaccgtccaatccatgtcattctgcctctgattatcaacctgagggataggcttcacagagagtgtggatacccagcaaacctgagggttcgtgttggtgctgggggtggcattgggtgtccccaagctgcgctggcaactttcaacatgggtgcctctttcattgtcactggaacagtgaaccaagttgccaaacaatctgggacgtgtgacaatgtgaggaaacagcttgcgaaagcaacttactcagatgtttgcatggcaccggcagctgacatgtttgaggaaggtgtgaaacttcaagttttgaagaaaggaacaatgttcccttcaagagccaacaaactctatgagttgttctgcaagtatgattcttttgagtccatgcctccagcagagcttgcgagggttgagaaaagaatcttcagtcgtgcattggaagaggtctgggatgagaccaagaacttctacatcaaccgtctccacaacccagagaagatacagagggctgagagggaccccaaactgaagatgtcactgtgtttcagatggtatctgtccctggcttcaaggtgggccaacactggagcttctgacagagtcatggactaccaagtttggtgtggtcctgccattggttcattcaatgatttcatcaaaggaacttaccttgatccggcagtggcaaatgagtacccgtgtgttgtgcagatcaacaaacagattcttagaggagcgtgcttcttgaggcgtcttgaaatactgagaaatgcaaggctttcagatggtgcagctgcacttgtggcgagcattgatgacacatatgtccctgctgagaagctgtgagtagttagcttaatcacttaggtcacccagtccaagcccggcctagcacgatgatcatgagtgttgctattgatgtatgttaatactatacacagtcatcgtgtgtgttttataaaactgtaagcttaggatgtttgaggctaatgtaattagcactacaccgtaataaatgagaggtttactttatgttttaataatgttcttacccttgctgctctctaaactgtaatggcgtacggttagctaaactaaagtaaaaatcgattcgcttgagtaaaattagtgaccgggaaagatcatcgactactactgctcagagatgtaatcggtaattaagacttcaagctcaataattaattaggagtaaatctggcttcgaatttttaaattgtcaacttccaaagaaggattggcaagactcaatctcaattgcccaacaaacatatggctctttacaaatttggaatctctttttgatggcaagaacgtcgtaattcctctgtcgatctcatgtaattaccaaactcatctacttattactttctttatatgcacttactgatgcggccgcttaattaatctgacctgaccactagacctgagtgagtacagatgtgctactagtgctagcctcgaggtcgaccaacttttctatacaaagttgtctagacctaggactaggcactgagtgactcactgacctgactgagtgactggcggccgcagcttatagtaaagatttttttgttaataaaatgaaagttaatatttatggatttatttgaacatatttacaagtttttgttaataaatttatttacagaagtgttaaatttgaaaatgtgttaaatgagagttaatatttatggatataatattactttatttaaaaataaaatgaatttatattaaaatatgatttggtaaaagatattataaagaggaacttggatgagaaagacgacgatgggcaaaagttgcatggcacaccgcttttgttcagtaacatctgcactgtggcgcctttttcacactcaccatgcatgctgccacgtcagctttcacactatgacaccactggccatacacgttgccacctcagctttctcctcttctcactatgacacgactggccatgcatgcatgcatgctgccacctcagctcccgcctcttcacccgtgtctttctctcatgtcgcagtgctgcgtgccaacctcttctctctataaatagagagaagagaatgatggttaaactcaaaccaaaacaagaaaacatacacaaatagcaaaacggatccacaaccaaaaatggcgcttcgtgtcaagaccaacaagaagccatgttgggagatgaccaaggaggaactgacctctggcaaaactgaggtgttcaactatgaggaactcctggagtttgcagagggtgacatagctaaggtttttggtccggagtttgctgtcatagacaagtaccccagaagggtgaggctgcctgctcgtgaatacctgcttgtgacaagggtcacactcatggatgccgaggtcaacaactacagagttggtgccagaatggtcactgagtatgatcttccagtgaatggcgaattgtctgagggaggtgattgtccctgggcagttctggttgagagtggacagtgcgatttgatgctgatatcatacatgggaattgatttccagaaccaaggtgacagagtttaccgtctgctcaacaccacgttgacattctatggggttgcccatgagggagagacccttgagtatgacatcagagtgaccggttttgccaaacgtttggatggtggcatctccatgttcttctttgagtatgactgctatgtcaatgggaggcttctcattgagatgagagatggctgtgctggcttcttcacaaatgaggagcttgatgcgggaaagggtgtggtgttcacaagaggggatttggctgccagagctaagattccaaagcaagatgtttctccctatgctgtcgctccctgccttcacaaaacaaaactcaacgaaaaggagatgcagaccttggttgacaaagattgggcttccgtttttggctcaaagaatggcatgccggagatcaactacaaactctgcgcacgtaagatgctcatgattgatagagtcaccagcattgaccataagggaggtgtgtacggtttgggtcagttggttggtgagaaaatcttggagagggaccattggtacttcccatgccattttgttaaggatcaagtcatggctggatctcttgtcagcgacggttgttcacaaatgctcaagatgtacatgatctggctcggtttgcaccttaccaccggaccatttgacttcagacccgtcaacggacacccgaacaaagttaggtgtaggggtcagatatctcctcataagggaaagttggtctacgtcatggagatcaaagagatgggattcgacgaggataacgatccgtacgccattgctgacgtcaacatcattgacgttgatttcgaaaagggtcaagatttcagccttgatagaatcagcgactacggaaagggggatcttaacaaaaagatcgtcgtggacttcaagggcattgctctcaagatgcagaagagatccacgaacaagaacccctccaaagttcagcccgtttttgctaacggtgcagccactgtgggaccggaagcgtccaaggccagctctggtgccagtgctagtgcttctgctgcccctgcgaagcctgctttctcagcagatgttcttgcgccaaagccagttgcacttcctgaacatatcctcaagggtgacgctctcgctccgaaagaaatgtcctggcatcccatgtcaaaacttcctggcaacccgacgccgttcttctcccctagttcttaccctccgagggcaatttgcttcatccctttccctggcaacccacttgacaacaattgcaaagctggagaaatgcctctgaactggtacaacatgtcagagttcatgtgtggaaaagttagcaactgcttgggaccagagttcgcaagatttgataagtcaaatacgagcagaagccctgcttttgatttggctcttgtgactagagttgttgaagtcacaaacatggaacatggcaagttcctgaatgttgattgcaatcccagcaaaggcacaatggtgggggagtttgactgtcctcaagatgcgtggttctttgatggttcttgcaatgatgggcacatgccttattccatcatcatggaaatcggacttcagacatccggtgttctcaccagtgtgttgaaagcaccactgacgatggacaaagatgacattctctttaggaaccttgatgcaagtgctgaaatggtgaggccagatgtggatgtgagggggaaaaccataaggaatgtgaccaagtgcactggatatgcaatgttgggaaagatggggattcacagattcacgtttgagttgtctgttgatggcgtggttttctacaaaggaagcacttcctttggatggttcactccagaggtgtttgctcagcaagctggacttgacaatgggaaaaagacggagccttggtgcaaaactaacaacacgagtgtgagaagagttgaaatcgcatcagccaaaggcaaagaacagctgactgagaaacttccagatgcaactaatgctcaagttctcagaaggtcagaacagtgtgagtatttggattacctcaacattgctcctgattctgggctgcatgggaaaggatatgcgcatggacacaaagatgttaacccacaagactggttcttctcttgtcacttttggtttgatcctgtgatgcctggatctttgggaattgagtcaatgttccagctcattgaggcatttgcggtggaccagaacataccgggagaatacaatgtgagcaatccgacctttgcccatgcccctggaaaaacggcgtggaagtaccgtggtcaattgacaccaaagaaccgtgcgatggactgtgaggtgcacatagtttcaatcacagcctctcctgaaaatggaggctacgttgacatagtggcagatggagcactttgggttgatggtctccgtgtgtatgaagccaaagaactcagagttcgtgttgtcagtgcaaaacctcaagccattccggatgttcaacaacagccacccagcgcaaaagcggaccctgggaaaactggagttgcactcagtccgactcagttgagagatgtcctgcttgaagtggacaatccattgtatcttggtgttgaaaactccaatttggtgcagtttgaatccaaacctgcaacttcttcaaggattgtcagtatcaaaccatgctccataagtgatcttggtgacaagtccttcatggaaacgtacaatgtgtcagcacctctgtacactggagcaatggccaagggaattgcgtctgcggaccttgtcattgctgctgggaagaggaagatattgggttcttttggagcgggtgggcttccaatgcaccatgtgagggcagctttggagaagatacaagcggctctgcctcaaggaccatatgctgtgaacctcattcattcaccttttgacagcaacttggaaaaggggaatgttgatctcttcctcgaaaagggcgttactgtggtggaggcttctgcattcatgaccctcactccccaagttgttcgttaccgtgcagccggactctcaaggaacgctgatgggagtgtcaacatcagaaaccgtatcattggaaaagtgtccagaacagaactcgccgaaatgttcatcagaccggctccggaacacctccttgagaaactcatagcttctggtgagataacacaagaacaagccgaacttgcccgtcgtgttcctgtcgcagacgacatcgctgttgaagctgattctggtggtcacactgacaaccgtcccatccacgtcatcttgcctttgatcatcaaccttaggaacagactgcacagagagtgtggttatcctgcgcaccttagagtcagagttggagctggaggcggtgttggctgcccacaagctgctgcggctgccctcacaatgggagctgccttcatagtgactgggactgtcaatcaagttgctaaacagtccgggacatgtgacaacgtgagaaaacaactcagtcaagccacctacagtgacatttgcatggctccagcagctgatatgtttgaggaaggtgtgaaactccaagttctcaagaagggaacaatgttcccatcaagagctaacaaattgtacgaactcttttgcaagtacgactctttcgattcaatgcctcctgctgaacttgaaaggatcgagaagaggatcttcaagagggcacttcaagaggtctgggaagagaccaaggacttttacatcaatggtttgaagaatccagagaagatacagagagcggaacatgaccccaaactcaagatgtctttgtgtttcagatggtatcttggtcttgcatcacgttgggccaacatgggtgctcctgatcgtgtcatggactatcaagtctggtgtggtccagccattggagccttcaatgacttcatcaaaggaacatatcttgatcctgctgtctctaatgagtacccatgtgttgtccagatcaaccttcagattttgcgtggtgcatgttacctgaggcgtcttaatgctctgagaaatgatccgaggattgatcttgagactgaagatgctgcctttgtctatgagccaacgaatgcgctttgagtagttagcttaatcacttaggtcacccagtccaagcccggcctagcacgatgatcatgagtgttgctattgatgtatgttaatactatacacagtcatcgtgtgtgttttataaaactgtaagcttaggatgtttgaggctaatgtaattagcactacaccgtaataaatgagaggtttactttatgttttaataatgttcttacccttgctgctctctaaactgtaatggcgtacggttagctaaactaaagtaaaaatcgattcgcttgagtaaaattagtgaccgggaaagatcatcgactactactgctcagagatgtaatcggtaattaagacttcaagctcaataattaattaggagtaaatctggcttcgaatttttaaattgtcaacttccaaagaaggattggcaagactcaatctcaattgcccaacaaacatatggctctttacaaatttggaatctctttttgatggcaagaacgtcgtaattcctctgtcgatctcatgtaattaccaaactcatctacttattactttctttatatgcacttactgatgcggccgcttaattaatcacgagtggatgactgtcacgactgactcatgactgactactagtgctagcctcgaggtcgacacaactttgtataataaagttgtctagacctaggcgagtcatgagtcgtgacatgacgtcatgctcatcagactgcggccgcagcttatagtaaagatttttttgttaataaaatgaaagttaatatttatggatttatttgaacatatttacaagtttttgttaataaatttatttacagaagtgttaaatttgaaaatgtgttaaatgagagttaatatttatggatataatattactttatttaaaaataaaatgaatttatattaaaatatgatttggtaaaagatattataaagaggaacttggatgagaaagacgacgatgggcaaaagttgcatggcacaccgcttttgttcagtaacatctgcactgtggcgcctttttcacactcaccatgcatgctgccacgtcagctttcacactatgacaccactggccatacacgttgccacctcagctttctcctcttctcactatgacacgactggccatgcatgcatgcatgctgccacctcagctcccgcctcttcacccgtgtctttctctcatgtcgcagtgctgcgtgccaacctcttctctctataaatagagagaagagaatgatggttaaactcaaaccaaaacaagaaaacatacacaaatagcaaaacggatccacaaccaacctaccatggctcccactcccgacgccaccgcgcctctgaacaagccgagcgactatgccgtctaccacgaggaagacggccccttctggaccgccgattccagcggcgtctcgcgcgtgaactttagcgagaccggcgtgggatccgagggcgtcatccctgcgctcacgctcatcgacgtcttcgagagggccgtcaagcgcggcggaaacaggatcgccttccgcacggaaaacatgcccacgctccgccgcggcgaagaggccccggacgcgctgccgctcaaggactggaagtcctggtcctggaaacagtacaaggccgacgtccaccgcatcgccagggctctcatggacctcggcgttgagcagcatgacgccgtctccatttttggctttaactcgcccgaatggtttctcagtgccgtcggcgccgtgcacgcaggtgccaagattgccggcatttacccctcagacacgcccgcccaggtccagtacaaggccttccacagtgacaccgctgttgccgttgtcgaaaacgagcagtgcttcaagaagttcgccgaggtcgtcgaggaccttccttacctcaaggccattgtttgctgggactatgaagccacagacatcacgcgcgaggacggctccgtcgtcgaggtcctcacctttgccgagttcctcaagcgcggcgacaccgtcgaggcggccgcccttgacgagcgcatctccaagatcgagcccaccatgtgcgctgcccttatttacaccagcggtactaccggccgccccaaggccgttatgatttcgcacgacaaccttgttttcgaggccagcgccgtcgtccccaacctcggaggagcctgtacgaccactgctgaggagcgcattctctcgtacctgcctctctcgcacgtcgctggtatgatggttgatattattgcccccatcattgccaccgccttccacaagggccgcatctgcgtctgctttgctcgcccgtacgatttgcgcaccggcacgctgggccagcgcctcaacgccgtggagcccaccatcttccttggcgtgccccgtgtgtgggaaaagattcaggaaaagctcatggccgtcggtgccaaaaccaccggcctcaagaagaagctctctacggccgccaagaagcgtggtcttgaattccaggaggagcagcaaatcggccgctccggtgccaaccctggctttggcccccttggcatctacaagaagctcctcggcctcatcaagggcaagctgggcctcaccaagtgcaagtttgcctttgctggtgccgcgcccatgacccgtgagacccttcagtactttggcgcgctgaacatcaacattaacgaggtctacggcatgtccgagtgctccggtgccgccacctggtccacggacaaggcccacgagtggggcactgttggctacgagatgcccagttgcgaggtccgcgtcttcaagattgccgaggacggtaccaagaccgagtgcccgcgcgccgccgacattatgcatgctaccgaggaggagcagggcgaagtttgcttccgcggccgtaacatcatgatgggctaccttgccaaccccaagcttggcgacgaccacgttgccgagatcgaggagaagaacgctgccgctatcgactccgagggctggctccacagtggtgataagggcgccatttctacccgcggcatgctcaagatcacgggccgctacaaggagctcatcatcggcgccggtggcgagaacgtggcgcccgtccctattgaggacgccatcaaggcgcgcatgccttttgtttccaacgccatgatggtcggagataagcgcaagttcatggctgtcctccttaccctcaagacggttggcgccacgggcgagcttcccggtacgaacaagctcatgggcgctgccgccgactatggtgagaccatcgaggacgcctgcgacaacgaggcgctcattgaggagatcacgcagcagctcaaggagatcggtgatgatggcgatgtcacgccctcgaacgcggctcgcatccaaaagttcaccattctcccgctcgacttttccgtctccacggacgagctcacggccacgctcaagctcaagcgctccgtggtcgcagacaagtacgaagacatcatcgaggccttttacgagtccaagagcgtttttgtgccgtactcgaccgttggcgcctacgccacgggcggcccggtcgacgactccgttgtcgatggctccttcaagggcgactttagcatgattggcgacgatgatccggatcttcaaaacgtcgatgtcctcgaggcgattgacgaggacaattaaatttccagtccaagcccggcctagcacgatgatcatgagtgttgctattgatgtatgttaatactatacacagtcatcgtgtgtgttttataaaactgtaagcttaggatgtttgaggctaatgtaattagcactacaccgtaataaatgagaggtttactttatgttttaataatgttcttacccttgctgctctctaaactgtaatggcgtacggttagctaaactaaagtaaaaatcgattcgcttgagtaaaattagtgaccgggaaagatcatcgactactactgctcagagatgtaatcggtaattaagacttcaagctcaataattaattaggagtaaatctggcttcgaatttttaaattgtcaacttccaaagaaggattggcaagactcaatctcaattgcccaacaaacatatggctctttacaaatttggaatctctttttgatggcaagaacgtcgtaattcctctgtcgatctcatgtaattaccaaactcatctacttattactttctttatatgcacttactgatgcggccgcttaattaatctgatcatggatgctacgtcacggcagtacaggactatccctaggagctgtgctgggtaactcacatgagtcactggtcacatcagcggccgcagcttatagtaaagatttttttgttaataaaatgaaagttaatatttatggatttatttgaacatatttacaagtttttgttaataaatttatttacagaagtgttaaatttgaaaatgtgttaaatgagagttaatatttatggatataatattactttatttaaaaataaaatgaatttatattaaaatatgatttggtaaaagatattataaagaggaacttggatgagaaagacgacgatgggcaaaagttgcatggcacaccgcttttgttcagtaacatctgcactgtggcgcctttttcacactcaccatgcatgctgccacgtcagctttcacactatgacaccactggccatacacgttgccacctcagctttctcctcttctcactatgacacgactggccatgcatgcatgcatgctgccacctcagctcccgcctcttcacccgtgtctttctctcatgtcgcagtgctgcgtgccaacctcttctctctataaatagagagaagagaatgatggttaaactcaaaccaaaacaagaaaacatacacaaatagcaaaacggatccacaaccaaaaatgcttcagcacacttggcttccgaagcctcccaatctgaccctcttgtcagatgaggttcatctctggaggattcctcttgaccagcctgagtcacaacttcaagaccttgctgccaccctgagcagtgatgaattggcgagggcaaacagattctactttccagaacacagaaggcgtttcactgctgggagaggcatcctcagatccatcttgggtggatacttgggagtggaaccgggtcaagtcaagtttgattatgagtcccgtgggaaaccgatccttggtgacagatttgctgagagtggactcctgttcaacttgtctcacagccagaaccttgccttgtgtgctgtcaactacacgcgtcaaataggcattgatcttgaatatctgcgtccaacatctgacttggagtctcttgcaaagaggttctttctcccaagagaatatgaactcttgaggtcactccctgatgagcagaaacagaagattttctttcgttactggacttgcaaagaggcttatctcaaagcaacgggagatggaatagccaaacttgaagagatcgagatagcactcaccccaacagaacctgccaagctccaaacagctcctgcgtggtctctgttggagcttgtgccagatgacaattgtgttgcagctgtggctgttgcgggttttggttggcagcccaagttctggcattactgagtagttagcttaatcacttaggtcacccagtccaagcccggcctagcacgatgatcatgagtgttgctattgatgtatgttaatactatacacagtcatcgtgtgtgttttataaaactgtaagcttaggatgtttgaggctaatgtaattagcactacaccgtaataaatgagaggtttactttatgttttaataatgttcttacccttgctgctctctaaactgtaatggcgtacggttagctaaactaaagtaaaaatcgattcgcttgagtaaaattagtgaccgggaaagatcatcgactactactgctcagagatgtaatcggtaattaagacttcaagctcaataattaattaggagtaaatctggcttcgaatttttaaattgtcaacttccaaagaaggattggcaagactcaatctcaattgcccaacaaacatatggctctttacaaatttggaatctctttttgatggcaagaacgtcgtaattcctctgtcgatctcatgtaattaccaaactcatctacttattactttctttatatgcacttactgatgcggccgcttaattaactactgtcactgaggccgtagacgagtacggactgatctaactagtgctagcctcgaggtcgacacccagctttcttgtacaaagtggttgcggccgcttaattaaatttaaattcaattaatgcaatcttgattttcaacaacgaaggtaatggcgtaaaagaaaaaatgtatgttattgtattgatctttcatgatgttgaagcgtgccataatatgatgatgtataattaaaatattaactgtcgcattttattgaaatggcactgttatttcaaccatatctttgattctgttacatgacacgactgcaagaagtaaataatagacgccgttgttaaagaattgctatcatatgtgcctaactagagggaatttgagcgtcagacctaatcaaatattacaaaatatctcactctgtcgccagcaatggtgtaatcagcgcagacaaatggcgtaaagatcgcggaaaaacctccccgagtggcatgatagctgcctctgtattgctgatttagtcagccttatttgacttaagggtgccctcgttagtgacaaattgctttcaaggagacagccatgccccacactttgttgaaaaacaaattgcctttggggagacggtaaagccagttgctcttcaataaggaatgtcgaggaggcaatgtaaccgcctctggtagtacacttctctaatccaaaaatcaatttgtattcaagataccgcaaaaaacttatggtttaaaccctgcaggactagtccagaaggtaattatccaagatgtagcatcaagaatccaatgtttacgggaaaaactatggaagtattatgtaagctcagcaagaagcagatcaatatgcggcacatatgcaacctatgttcaaaaatgaagaatgtacagatacaagatcctatactgccagaatacgaagaagaatacgtagaaattgaaaaagaagaaccaggcgaagaaaagaatcttgaagacgtaagcactgacgacaacaatgaaaagaagaagataaggtcggtgattgtgaaagagacatagaggacacatgtaaggtggaaaatgtaagggcggaaagtaaccttatcacaaaggaatcttatcccccactacttatccttttatatttttccgtgtcatttttgcccttgagttttcctatataaggaaccaagttcggcatttgtgaaaacaagaaaaaatttggtgtaagctattttctttgaagtactgaggatacaacttcagagaaatttgtaagtttgtaggtaccagatctggatcccaaaccatgtctccggagaggagaccagttgagattaggccagctacagcagctgatatggccgcggtttgtgatatcgttaaccattacattgagacgtctacagtgaactttaggacagagccacaaacaccacaagagtggattgatgatctagagaggttgcaagatagatacccttggttggttgctgaggttgagggtgttgtggctggtattgcttacgctgggccctggaaggctaggaacgcttacgattggacagttgagagtactgtttacgtgtcacataggcatcaaaggttgggcctaggatctacattgtacacacatttgcttaagtctatggaggcgcaaggttttaagtctgtggttgctgttataggccttccaaacgatccatctgttaggttgcatgaggctttgggatacacagcccggggtacattgcgcgcagctggatacaagcatggtggatggcatgatgttggtttttggcaaagggattttgagttgccagctcctccaaggccagttaggccagttacccaaatctgagtagttagcttaatcacctagagctcgatcggcggcaatagcttcttagcgccatcccgggttgatcctatctgtgttgaaatagttgcggtgggcaaggctctctttcagaaagacaggcggccaaaggaacccaaggtgaggtgggctatggctctcagttccttgtggaagcgcttggtctaaggtgcagaggtgttagcgggatgaagcaaaagtgtccgattgtaacaagatatgttgatcctacgtaaggatattaaagtatgtattcatcactaatataatcagtgtattccaatatgtactacgatttccaatgtctttattgtcgccgtatgtaatcggcgtcacaaaataatccccggtgactttcttttaatccaggatgaaataatatgttattataatttttgcgatttggtccgttataggaattgaagtgtgcttgaggtcggtcgccaccactcccatttcataattttacatgtatttgaaaaataaaaatttatggtattcaatttaaacacgtatacttgtaaagaatgatatcttgaaagaaatatagtttaaatatttattgataaaataacaagtcaggtattatagtccaagcaaaaacataaatttattgatgcaagtttaaattcagaaatatttcaataactgattatatcagctggtacattgccgtagatgaaagactgagtgcgatattatggtgtaatacataggaattcgtttaaacgatctgcgtctaattttcggtccaacttgcacaggaaagacgtcgaccgcggtagctcttgcccagcagactgggcttccagtcctttcgctcgatcgggtccaatgttgtcctcagctgtgaaccggaagcggacgaccaacagtggaagaactgaaaggaacgagccgtctataccttgatgatcggcctctggtgaagggtatcatcgcagccaagcaagctcatgaaaggctgatgggggaggtgtataattatgaggcccacggcgggcttattctttagggaggatctatctcgttgctcaagtgcatggcgcaaagcagttattggagtgcggattttcgttggcatattattcgccacgagttagcagacgaagagaccttcatgaacgtggccaaggccagagttaagcagatgttacgccctgctgcaggcctttctattatccaatagttggttgatctttggaaagagcctcggctgaggcccatactgaaagagatcgatggatatcgatatgccatgttgtttgctagccagaaccagatcacatccgatatgctattgcagcttgacgcagatatggaggataagttgattcatgggatcgctcaggagtagctcatccatgcacgccgacaagaacagaaattccgtcgagttaacgcagccgcttacgacggattcgaaggtcatccattcggaatgtattagtttgcaccagctccgcgtcacacctgtcttcatttgaataagatgttagcaattgtttttagctttgtcttgttgtggcagggcggcaagtgcttcagacatcattctgttttcaaattttatgctggagaacagcttcttaattcctttggaaataatagactgcgtcttaaaattcagatgtctggatatagatatgattgtaaaataacctatttaagtgtcatttagaacataagttttatgaatgttcttccattttcgtcatcgaacgaataagagtaaatacaccttttttaacattacaaataagttcttatacgttgtttatacaccgggaatcatttccattattttcgcgcaaaagtcacggatattcgtgaaagcgacataaactgcgaaatttgcggggagtgtcttgagtttgcctcgaggctagcgcatgcacatagacacacacatcatctcattgatgcttggtaataattgtcattagattgtttttatgcatagatgcactcgaaatcagccaattttagacaagtatcaaacggatgtgacttcagtacattaaaaacgtccgcaatgtgttattaagttgtctaagcgtcaatttgatttacaattgaatatatcctgccccagccagccaacagctcgatttacaattgaatatatcctgccggccggcccacgcgtgtcgaggaattctgatctggcccccatttggacgtgaatgtagacacgtcgaaataaagatttccgaattagaataatttgtttattgctttcgcctataaatacgacggatcgtaatttgtcgttttatcaaaatgtactttcattttataataacgctgcggacatctacatttttgaattgaaaaaaaattggtaattactctttctttttctccatattgaccatcatactcattgctgatccatgtagatttcccggacatgaagccatttacaattgaatatatcctgccgccgctgccgctttgcacccggtggagcttgcatgttggtttctacgcagaactgagccggttaggcagataatttccattgagaactgagccatgtgcaccttccccccaacacggtgagcgacggggcaacggagtgatccacatgggacttttaaacatcatccgtcggatggcgttgcgagagaagcagtcgatccgtgagatcagccgacgcaccgggcaggcgcgcaacacgatcgcaaagtatttgaacgcaggtacaatcgagccgacgttcacgcggaacgaccaagcaagcttggctgccatttttggggtgaggccgttcgcggccgaggggcgcagcccctggggggatgggaggcccgcgttagcgggccgggagggttcgagaagggggggcaccccccttcggcgtgcgcggtcacgcgcacagggcgcagccctggttaaaaacaaggtttataaatattggtttaaaagcaggttaaaagacaggttagcggtggccgaaaaacgggcggaaacccttgcaaatgctggattttctgcctgtggacagcccctcaaatgtcaataggtgcgcccctcatctgtcagcactctgcccctcaagtgtcaaggatcgcgcccctcatctgtcagtagtcgcgcccctcaagtgtcaataccgcagggcacttatccccaggcttgtccacatcatctgtgggaaactcgcgtaaaatcaggcgttttcgccgatttgcgaggctggccagctccacgtcgccggccgaaatcgagcctgcccctcatctgtcaacgccgcgccgggtgagtcggcccctcaagtgtcaacgtccgcccctcatctgtcagtgagggccaagttttccgcgaggtatccacaacgccggcggccgcggtgtctcgcacacggcttcgacggcgtttctggcgcgtttgcagggccatagacggccgccagcccagcggcgagggcaaccagcccggtgagcgtcggaaagggtcgacggatcttttccgctgcataaccctgcttcggggtcattatagcgattttttcggtatatccatcctttttcgcacgatatacaggattttgccaaagggttcgtgtagactttccttggtgtatccaacggcgtcagccgggcaggataggtgaagtaggcccacccgcgagcgggtgttccttcttcactgtcccttattcgcacctggcggtgctcaacgggaatcctgctctgcgaggctggccggctaccgccggcgtaacagatgagggcaagcggatggctgatgaaaccaagccaaccaggaagggcagcccacctatcaaggtgtactgccttccagacgaacgaagagcgattgaggaaaaggcggcggcggccggcatgagcctgtcggcctacctgctggccgtcggccagggctacaaaatcacgggcgtcgtggactatgagcacgtccgcgagctggcccgcatcaatggcgacctgggccgcctgggcggcctgctgaaactctggctcaccgacgacccgcgcacggcgcggttcggtgatgccacgatcctcgccctgctggcgaagatcgaagagaagcaggacgagcttggcaaggtcatgatgggcgtggtccgcccgagggcagagccatgacttttttagccgctaaaacggccggggggtgcgcgtgattgccaagcacgtccccatgcgctccatcaagaagagcgacttcgcggagctggtattcgtgcagggcaagattcggaataccaagtacgagaaggacggccagacggtctacgggaccgacttcattgccgataaggtggattatctggacaccaaggcaccaggcgggtcaaatcaggaataagggcacattgccccggcgtgagtcggggcaatcccgcaaggagggtgaatgaatcggacgtttgaccggaaggcatacaggcaagaactgatcgacgcggggttttccgccgaggatgccgaaaccatcgcaagccgcaccgtcatgcgtgcgccccgcgaaaccttccagtccgtcggctcgatggtccagcaagctacggccaagatcgagcgcgacagcgtgcaactggctccccctgccctgcccgcgccatcggccgccgtggagcgttcgcgtcgtctcgaacaggaggcggcaggtttggcgaagtcgatgaccatcgacacgcgaggaactatgacgaccaagaagcgaaaaaccgccggcgaggacctggcaaaacaggtcagcgaggccaagcaggccgcgttgctgaaacacacgaagcagcagatcaaggaaatgcagctttccttgttcgatattgcgccgtggccggacacgatgcgagcgatgccaaacgacacggcccgctctgccctgttcaccacgcgcaacaagaaaatcccgcgcgaggcgctgcaaaacaaggtcattttccacgtcaacaaggacgtgaagatcacctacaccggcgtcgagctgcgggccgacgatgacgaactggtgtggcagcaggtgttggagtacgcgaagcgcacccctatcggcgagccgatcaccttcacgttctacgagctttgccaggacctgggctggtcgatcaatggccggtattacacgaaggccgaggaatgcctgtcgcgcctacaggcgacggcgatgggcttcacgtccgaccgcgttgggcacctggaatcggtgtcgctgctgcaccgcttccgcgtcctggaccgtggcaagaaaacgtcccgttgccaggtcctgatcgacgaggaaatcgtcgtgctgtttgctggcgaccactacacgaaattcatatgggagaagtaccgcaagctgtcgccgacggcccgacggatgttcgactatttcagctcgcaccgggagccgtacccgctcaagctggaaaccttccgcctcatgtgcggatcggattccacccgcgtgaagaagtggcgcgagcaggtcggcgaagcctgcgaagagttgcgaggcagcggcctggtggaacacgcctgggtcaatgatgacctggtgcattgcaaacgctagggccttgtggggtcagttccggctgggggttcagcagccagcgctttactggcatttcaggaacaagcgggcactgctcgacgcacttgcttcgctcagtatcgctcgggacgcacggcgcgctctacgaactgccgataaacagaggattaaaattgacaattgtgattaaggctcagattcgacggcttggagcggccgacgtgcaggatttccgcgagatccgattgtcggccctgaagaaagctccagagatgttcgggtccgtttacgagcacgaggagaaaaagcccatggaggcgttcgctgaacggttgcgagatgccgtggcattcggcgcctacatcgacggcgagatcattgggctgtcggtcttcaaacaggaggacggccccaaggacgctcacaaggcgcatctgtccggcgttttcgtggagcccgaacagcgaggccgaggggtcgccggtatgctgctgcgggcgttgccggcgggtttattgctcgtgatgatcgtccgacagattccaacgggaatctggtggatgcgcatcttcatcctcggcgcacttaatatttcgctattctggagcttgttgtttatttcggtctaccgcctgccgggcggggtcgcggcgacggtaggcgctgtgcagccgctgatggtcgtgttcatctctgccgctctgctaggtagcccgatacgattgatggcggtcctgggggctatttgcggaactgcgggcgtggcgctgttggtgttgacaccaaacgcagcgctagatcctgtcggcgtcgcagcgggcctggcgggggcggtttccatggcgttcggaaccgtgctgacccgcaagtggcaacctcccgtgcctctgctcacctttaccgcctggcaactggcggccggaggacttctgctcgttccagtagctttagtgtttgatccgccaatcccgatgcctacaggaaccaatgttctcggcctggcgtggctcggcctgatcggagcgggtttaacctacttcctttggttccgggggatctcgcgactcgaacctacagttgtttccttactgggctttctcagcccccgagcgcttagtgggaatttgtaccccttatcgaaccgggagcacaggatgacgcctaacaattcattcaagccgacaccgcttcgcggcgcggcttaattcaggagttaaacatcatgagggaagcggtgatcgccgaagtatcgactcaactatcagaggtagttggcgtcatcgagcgccatctcgaaccgacgttgctggccgtacatttgtacggctccgcagtggatggcggcctgaagccacacagtgatattgatttgctggttacggtgaccgtaaggcttgatgaaacaacgcggcgagctttgatcaacgaccttttggaaacttcggcttcccctggagagagcgagattctccgcgctgtagaagtcaccattgttgtgcacgacgacatcattccgtggcgttatccagctaagcgcgaactgcaatttggagaatggcagcgcaatgacattcttgcaggtatcttcgagccagccacgatcgacattgatctggctatcttgctgacaaaagcaagagaacatagcgttgccttggtaggtccagcggcggaggaactctttgatccggttcctgaacaggatctatttgaggcgctaaatgaaaccttaacgctatggaactcgccgcccgactgggctggcgatgagcgaaatgtagtgcttacgttgtcccgcatttggtacagcgcagtaaccggcaaaatcgcgccgaaggatgtcgctgccgactgggcaatggagcgcctgccggcccagtatcagcccgtcatacttgaagctaggcaggcttatcttggacaagaagatcgcttggcctcgcgcgcagatcagttggaagaatttgttcactacgtgaaaggcgagatcaccaaggtagtcggcaaataatgtctaacaattcgttcaagccgacgccgcttcgcggcgcggcttaactcaagcgttagagagctggggaagactatgcgcgatctgttgaaggtggttctaagcctcgtcttgcgatggcatttcgatccattcccattccgcgctcaagatggcttcccctcggcagttcatcagggctaaatcaatctagccgacttgtccggtgaaatgggctgcactccaacagaaacaatcaaacaaacatacacagcgacttattcacacgagctca

SEQ ID NO: 45 - DNA, 38760 bp, Artificial sequence
  plasmid pDAB101477
aattacaacggtatatatcctgccagtcagcatcatcacaccaaaagttaggcccgaatagtttgaaattagaaagctcgcaattgaggtctacaggccaaattcgctcttagccgtacaatattactcaccggatcctaaccggtttaattaaggcgcgccatgcccgggcaagcggccgcacaagtttgtacaaaaaagcaggcttctagacctaggtggagtcatcacgcagactatctcagcatgtgcgtagcacgcggccgcagcttatagtaaagatttttttgttaataaaatgaaagttaatatttatggatttatttgaacatatttacaagtttttgttaataaatttatttacagaagtgttaaatttgaaaatgtgttaaatgagagttaatatttatggatataatattactttatttaaaaataaaatgaatttatattaaaatatgatttggtaaaagatattataaagaggaacttggatgagaaagacgacgatgggcaaaagttgcatggcacaccgcttttgttcagtaacatctgcactgtggcgcctttttcacactcaccatgcatgctgccacgtcagctttcacactatgacaccactggccatacacgttgccacctcagctttctcctcttctcactatgacacgactggccatgcatgcatgcatgctgccacctcagctcccgcctcttcacccgtgtctttctctcatgtcgcagtgctgcgtgccaacctcttctctctataaatagagagaagagaatgatggttaaactcaaaccaaaacaagaaaacatacacaaatagcaaaacggatccacaaccaaaaatggcagcgaggctgcaagagcagaaaggaggtgagatggacacgaggattgcgatcataggcatgagcgccatacttccttgtggaaccacggtgagagagtcatgggagaccataagggctggcattgattgcctgtctgatcttcctgaggatcgtgttgatgtgactgcgtactttgacccagtcaagaccacaaaggacaaaatctactgcaagagaggaggtttcattcctgagtatgactttgatgcgcgtgagtttggtctcaacatgttccagatggaagattctgatgcgaatcagaccatctcacttctcaaggtcaaagaagcacttcaagatgctgggattgatgcacttggaaaggagaagaaaaacataggatgcgtgcttggcattggaggtggacagaagagttcacatgagttctacagcagactcaactatgtggttgtggagaaagtcttgagaaagatggggatgccagaggaagatgtcaaagtggctgtggagaagtacaaagcgaacttcccagaatggagacttgactctttccctggattccttgggaatgtcactgctggcagatgcaccaacacattcaacttggatggcatgaactgcgttgtggatgctgcatgtgcaagctccttgatagcagtcaaggttgcgattgatgaactgctctatggtgactgcgacatgatggtcactggtgcaacctgcacagacaactccattgggatgtacatggctttctcaaagacacctgtgttcagcacggacccaagtgtgagagcgtatgatgagaaaacgaaagggatgctcattggtgagggatcagccatgttggtgctcaaacgttatgcagatgcagtgagggatggtgatgagattcatgctgtgattcgtggttgtgcaagctcaagtgatggcaaagcagctggcatctacactcccacaatcagtggtcaagaggaagccttgagacgtgcatacaatcgtgcctgcgttgaccctgccactgtcactttggttgagggtcatgggactggcactccagttggagataggattgagttgactgcgttgaggaacttgtttgacaaagcgtatggtgaagggaacacagagaaagttgcagttggaagtatcaagtccagtattggtcatttgaaggctgttgctggtcttgctggaatgatcaaggtcatcatggctctcaaacacaagactttgcctggaacgatcaatgtggacaatccacccaatctctatgacaacactcccatcaatgagtcatccctctacatcaacacgatgaacagaccctggttccctccacctggtgttccgagacgtgctggaatatccagctttggctttggaggtgccaactaccatgcagtgttggaagaggctgaaccagagcacacgacagcgtacagactcaacaaacgtccacaaccggtgttgatgatggctgcaactcctgctgcgttgcagagcctttgtgaagctcagctgaaagagtttgaagctgcgatcaaggagaatgagacagtcaagaatactgcctacatcaagtgtgtcaagtttggagaacagttcaagttccctgggagcatacctgcgaccaatgcgagactgggattcttggtcaaagatgcggaggatgcgtgctccacgcttcgtgctatatgtgctcagtttgccaaagatgtgaccaaagaagcgtggaggcttccgagagaaggagtttctttccgtgccaaaggcattgccaccaatggtgctgttgctgcactcttctctggacaaggtgctcagtacacacacatgttcagtgaagttgcgatgaactggcctcagttcagacagtccattgctgcaatggacgctgcacagtccaaggttgctggaagtgacaaagactttgaaagagtctctcaagtcctgtacccaaggaaaccgtacgaacgtgagccagaacaagatcacaagaaaatctcactcacagcatacagccagccgtcaaccctggcatgtgctcttggtgcctttgagattttcaaggaagctggattcactccagactttgcagctggacacagcttgggtgagtttgctgcgctctatgcagctggttgtgttgacagagatgagttgtttgaacttgtttgcagaagggcaaggatcatgggaggcaaagatgcacctgccacacccaaaggttgcatggcagctgtcataggacccaacgcagagaacatcaaggttcaagctgccaacgtctggcttggaaactcaaactctccgtctcagactgtcattactgggtctgttgaagggattcaagctgaaagtgccagattgcagaaggaagggttcagagttgtgcctcttgcttgtgagtctgccttccattctccacagatggaaaatgccagctcagctttcaaagatgtcatatccaaggtttccttccgtacacccaaagcagaaacaaagctcttcagcaatgtttctggagagacctatccgacggatgccagagagatgctcactcaacacatgacctcatctgtgaagttcctgacccaagtgaggaacatgcaccaagctggtgcgagaatctttgttgagtttggaccgaaacaagttctcagcaaacttgtttctgaaaccctcaaagatgacccgtctgttgtcacagtgtctgtgaacccagcttctggcacggactctgacatacagttgagggatgctgcagttcagctggttgtggctggtgtcaatcttcaagggtttgacaagtgggatgctcctgatgccacgaggatgcaagccatcaagaaaaagagaaccacactcagactttcagctgccacctatgtcagtgacaagaccaagaaagtgagggatgctgccatgaacgacggaagatgtgtcacatacctcaagggtgctgcaccactcatcaaggctcctgaacctgtggttgacgaagctgccaagagggaggctgaaaggcttcagaaggagcttcaagacgctcagaggcagcttgacgacgccaaacgtgcagctgcagaagccaactccaaacttgctgctgccaaggaggaagccaagactgctgcagcttcagccaagcctgcagttgacactgctgttgtggagaaacatcgtgccatcctcaagtccatgctggctgagctggatggttatggaagtgttgatgcttcttcccttcagcaacagcaacagcaacagactgctccggcgcctgttaaagccgctgcccctgccgctcccgttgcaagtgctcctgctcccgccgtgtccaacgagttgcttgagaaagctgagacagttgtgatggaggttctcgctgccaagactggatacgaaacagacatgattgaggcggacatggagcttgagactgagttgggaattgacagcatcaagagggttgaaattctttctgaagtccaagctatgcttaacgttgaggcgaaagatgttgatgctctctctaggacgagaacagtgggtgaagttgtcaacgctatgaaggcagaaatcgctggttcttccgctccggcgccggcagctgccgcacctgcaccggctaaagcggctccagctgcagctgcaccagctgtttctaatgagctgctcgaaaaggcagaaactgttgtgatggaagtccttgctgccaaaactggctacgaaactgacatgatagaatcagacatggagcttgagacggagcttggaattgattccatcaagcgtgtggaaatcctcagtgaagtccaagccatgctcaatgtggaagctaaggatgtggatgctctctcaaggaccagaactgtcggtgaggttgtcaatgccatgaaggctgagatagctggaggctccgctcctgcgccggccgctgccgctcctggtcccgctgccgcggctccagctccagctgcagccgctccggccgtctcaaacgaactccttgaaaaagctgagaccgtcgtgatggaggtcttggcagctaaaaccggctatgagactgacatgattgagtctgacatggaattggagacagaacttgggatagacagcatcaaacgtgttgaaatcctcagtgaggtccaagctatgctgaacgtggaagcgaaggatgttgatgctctgtccagaacgaggaccgttggtgaggttgtggatgccatgaaggctgaaattgctggagggtctgcgcccgcgccagctgcagccgctcctgcacccgcagccgcggcacctgctccagctgcacctgcacctgccgtttcttcagaactcttggagaaggctgagacggttgtgatggaggttttggctgcaaagactggctatgagaccgacatgattgaatctgatatggaattggagacagagcttgggatcgattccatcaaaagagtggagatcctgagtgaagtccaagccatgctcaatgttgaagctaaggatgttgatgcactttcaagaacaaggacagtgggtgaggttgtggatgccatgaaggcggagattgctggagggagcgcgcctgcgccagctgccgcggcacctgcaccggcagccgcagctccagctccagctgcaccagcaccggccgcgcccgcgccagctgtttcatccgaactcctggaaaaggccgagacggttgtgatggaggtgctcgcagctaagactggttacgagaccgacatgattgaaagtgacatggagcttgaaaccgagttgggaatagatagcatcaaacgtgttgaaatcttgtctgaggtccaagctatgttgaacgtggaggcaaaagatgtcgatgcgctttcaagaaccagaacagtcggtgaggtcgtggacgccatgaaggctgaaattgccggaagctctgctagtgcgccagctgcagccgcacctgcacctgctgccgcggcacctgctccagctgcagccgctcctgccgtcagcaatgagttgctggagaaagccgaaacagttgtgatggaagtccttgctgcaaaaactggttacgaaacggacatgattgagtcagacatggaattggagaccgaacttggaatagattccatcaagagagtggagatcctctctgaggtgcaagccatgctcaacgttgaggctaaagatgttgatgcactcagtaggacaagaactgtgggggaagttgtcgatgcgatgaaggctgagattgctggaggctctgctcctgcgccggcagctgccgcacctgcacccgcagccgcggcaccagctgtcagcaacgaattgcttgagaaggctgaaacagttgtcatggaagtgctggctgcaaaaaccggctatgagactgacatgattgagtctgacatggaacttgagacggaattgggcattgacagcatcaagcgtgttgagatcctcagtgaagtccaagcaatgctcaatgtggaggctaaggatgtggatgccctctcaaggaccagaacagttggtgaggtcgttgatgcgatgaaggcggagatcgctggaagttccgcgcctgcgccagctgcagccgctcctgcacccgcagccgcggcaccggctccagctgcagccgcaccggccgtctcctcagaactcctggaaaaggctgagacagttgtgatggaagtccttgctgcgaaaactggctatgagaccgacatgattgaatctgacatggaactggagaccgagcttggaattgactccatcaaacgtgttgaaatcctctctgaggttcaagcgatgttgaatgtggaggccaaagatgttgatgctctttccagaacaaggacggtgggagaggtggttgatgccatgaaggctgagatagctgggggttctgctcctgcgccagctgcagccgctcctgctcccgctgccgcggcaccagctgtcagcaacgaactccttgaaaaagctgaaactgttgtgatggaggttttggctgcaaagactggatacgagactgacatgatagagtcagacatggagttggaaacagagcttgggattgatagcatcaagcgtgtggaaatcctttctgaggttcaagccatgctgaacgttgaggccaaagatgtcgatgctttgtcaaggaccagaacggttggagaagtggtcgatgccatgaaggctgagatagctggtggatcagcccctgctccggctgcagccgctcctgcaagtgccggtgctgcaccagctgtgaagattgattcagttcatggtgctgactgtgacgatttgtcactgatgcacgcaaaggtggttgacatcagaaggccagatgaactgattctggaaagaccggagaaccgtccagttcttgtcgttgacgatggctcagagttgacacttgctcttgtgagggtgttgggagcctgtgcagttgtcttgacctttgagggattgcagttggctcagagagctggtgcagctgccattcgtcatgttctggctaaggacctttcagcagaatcagctgagaaggccatcaaagaggctgagcaaagatttggagcgttgggaggcttcataagccagcaagcagaaaggtttgaaccagctgagatactgggtttcacactcatgtgtgcgaagtttgccaaagcctctctctgcactgctgtggctggaggtcgtcctgccttcatcggtgtggctaggcttgacggcagacttggattcacctctcaaggcacttctgacgcactcaagagagcacagcgtggagcgatctttggactctgcaagacaatagggttggagtggtcagaatctgatgtgttcagccgtggtgtggacattgctcaagggatgcacccagaagatgctgcagttgccatagttagggagatggcgtgtgctgacatcagaatcagagaggttgggattggagcaaaccagcaaagatgcacaatcagagctgccaagttggagactgggaaccctcagagacagatagcgaaagacgatgtgcttctggtttctggaggtgctcgtgggatcacacctctttgcatccgtgagatcacgcgtcagattgctggaggcaagtacattctgttgggtcgtagcaaagtttctgcgtctgaaccagcatggtgtgctggcatcactgatgagaaggctgtgcagaaagctgccacccaagagttgaagagggccttcagtgctggtgaaggacccaaacccactccaagggctgtcacgaaacttgtgggatctgttcttggtgctcgtgaagtgagaagctccattgctgccattgaagctctgggtggcaaagcgatctacagctcttgtgatgtgaactctgctgcagatgttgccaaagcagttagggatgcagagtcccagcttggtgccagagttagtggaatcgttcacgcttctggtgtgctccgtgatcgtctcatagagaagaaactccctgacgagtttgatgctgtctttgggaccaaagtcactgggttggagaatcttctggctgcagttgatcgtgccaacctcaaacacatggttctcttcagctcccttgctggtttccacggcaatgttggtcagtctgactatgcgatggcaaacgaagctctcaacaagatgggtttggaacttgcgaaggatgtcagtgtcaagtccatctgctttggtccctgggatggtgggatggtgacacctcaactcaagaaacagtttcaagaaatgggagttcagatcattcctcgtgaaggaggtgctgatacagttgcgaggattgtgttgggatcaagtcctgctgagatccttgttggaaactggaggacaccatccaagaaagttggaagtgacacgatcaccctgcatagaaagatcagtgccaagtccaatcccttcttggaggatcatgtcatacaaggcagaagggtgttgccaatgacccttgctattgggagccttgctgagacctgccttggactcttccctggctactctctctgggccatagatgacgcacagctcttcaaaggtgtcactgttgatggagacgtcaactgtgaagtgaccctcacaccgtccactgctccgagtgggagggtgaatgtccaagcgacgctcaagacgttctcaagtggaaaacttgttccagcctacagagctgtcatagtgttgtccaaccaaggtgctccacctgccaatgcaaccatgcagcctccgagccttgatgcagatcctgctttgcaagggtcagtctatgatggcaagactctctttcatggtcctgcgttcagaggcattgatgacgttctcagctgcaccaagagccagcttgttgccaagtgttctgctgttcctggatcagatgcagccagaggagagtttgcaactgacactgatgcacatgatccctttgtcaatgatcttgcctttcaagcaatgttggtctgggtgaggagaacgctgggacaagctgcactcccgaactccattcagaggatagtccaacacagaccggtcccacaagacaaacccttctacatcaccctcagatccaatcagagtggtggacatagccagcacaaacatgcacttcagttccacaacgaacaaggtgatctcttcattgatgttcaagcctctgtcattgcgacagactcacttgcgttctgagtagttagcttaatcacttaggtcacccagtccaagcccggcctagcacgatgatcatgagtgttgctattgatgtatgttaatactatacacagtcatcgtgtgtgttttataaaactgtaagcttaggatgtttgaggctaatgtaattagcactacaccgtaataaatgagaggtttactttatgttttaataatgttcttacccttgctgctctctaaactgtaatggcgtacggttagctaaactaaagtaaaaatcgattcgcttgagtaaaattagtgaccgggaaagatcatcgactactactgctcagagatgtaatcggtaattaagacttcaagctcaataattaattaggagtaaatctggcttcgaatttttaaattgtcaacttccaaagaaggattggcaagactcaatctcaattgcccaacaaacatatggctctttacaaatttggaatctctttttgatggcaagaacgtcgtaattcctctgtcgatctcatgtaattaccaaactcatctacttattactttctttatatgcacttactgatgcggccgcttaattaagatgagtgatactcaggactcaggactcactctgctgatcactagtgctagcctcgaggtcgacacaactttgtatacaaaagttgtctagacctaggctcagcaactcatccagtcaagttcgagtcagtgagttgggcggccgcagcttatagtaaagatttttttgttaataaaatgaaagttaatatttatggatttatttgaacatatttacaagtttttgttaataaatttatttacagaagtgttaaatttgaaaatgtgttaaatgagagttaatatttatggatataatattactttatttaaaaataaaatgaatttatattaaaatatgatttggtaaaagatattataaagaggaacttggatgagaaagacgacgatgggcaaaagttgcatggcacaccgcttttgttcagtaacatctgcactgtggcgcctttttcacactcaccatgcatgctgccacgtcagctttcacactatgacaccactggccatacacgttgccacctcagctttctcctcttctcactatgacacgactggccatgcatgcatgcatgctgccacctcagctcccgcctcttcacccgtgtctttctctcatgtcgcagtgctgcgtgccaacctcttctctctataaatagagagaagagaatgatggttaaactcaaaccaaaacaagaaaacatacacaaatagcaaaacggatccacaaccaaaaatggctgcaaggaacgtgagtgcggctcatgagatgcatgacgagaagaggatagctgttgtgggcatggctgttcagtatgctggatgcaaaacgaaagacgagttctgggaagttctcatgaatggaaaagttgagagcaaagtgatcagcgacaaacgtcttggttcaaattaccgtgctgaacactacaaagctgaaaggagcaagtatgctgacaccttctgcaatgagacatatggaactcttgatgagaacgaaatagacaatgagcatgaactccttttgaaccttgccaaacaagccttggctgaaacatctgtcaaagattcaacaagatgtggcatagtttctggatgcctcagcttcccgatggacaacctccaaggtgaactcttgaatgtgtaccagaaccatgttgagaagaaacttggtgccagagttttcaaagatgcctctcactggtcagaaagagaacagtccaacaaaccagaggctggtgacagaagaatcttcatggaccctgcttcctttgttgctgaggaactcaatcttggcgctctccactactctgttgatgctgcctgtgccactgcgctctatgtgctcagactggcgcaagatcacttggtctctggtgcagctgatgtgatgctttgtggtgcaacatgcctgccggagccgtttttcatactctctgggttctcaaccttccaagccatgcctgttggaacgggtcagaatgtgtccatgccgctgcacaaagattctcaaggattgacccctggtgaaggaggttccatcatggtcctcaaacgtttggatgacgcaatcagagatggagatcacatctatggaacacttttgggagccaatgtcagcaacagtggcactggtctgccacttaaaccccttttgccgtcagagaaaaagtgcctcatggacacctacacacgtatcaatgtgcatccccacaagattcagtatgttgaatgccatgcaactgggactccacaaggtgatcgtgtggaaattgatgctgtgaaggcttgctttgaaggcaaagtcccacgttttggaaccacaaaagggaactttggacacacattggtggcagctgggtttgctggcatgtgcaaagtgcttctctccatgaagcacgggatcattccacccactccgggaatagatgacgaaacgaagatggaccctctggttgtctctggtgaggccattccctggccagaaacgaatggagaaccgaagcgtgctggtctctcagcgtttggatttggtgggaccaatgctcatgctgtctttgaggaacatgacccaagcaatgctgcatgcactggccatgactccatttctgctctctctgcacgttgtggtggtgagtcaaacatgagaatagcaatcactgggatggatgccacttttggtgctttgaaaggattggatgcttttgaaagggccatctacactggtgctcatggtgctataccactcccagaaaagagatggagattcctggggaaagacaaggacttccttgatctttgtggagtcaaagcaacaccgcatggctgttacattgaagatgttgaagttgatttccagaggctgaggactccaatgactcctgaagatatgctcttgcctcaacagcttctggctgtcaccacaattgatagggccatattggactctggcatgaagaaaggtggaaatgtggctgtctttgtggggttggggaccgatcttgaactctaccgtcaccgtgcaagggttgctctcaaggagagagtgaggcctgaagccagcaagaaactcaatgacatgatgcagtacatcaatgattgtgggacaagcacttcttacaccagctacataggcaacttggttgcaacaagggtcagttcacaatggggcttcacgggaccttccttcacaatcacagaaggcaacaattctgtgtacagatgtgctgaacttggcaaatacctcttggaaacgggagaggttgatggggttgtggttgcgggtgttgatctctgtgggagtgctgagaacctttacgtcaagtcaaggcgtttcaaggtgtctacatctgacaccccgagagccagctttgatgcagctgctgatggttactttgttggagagggctgtggtgcatttgtgctcaagcgtgagacaagctgcaccaaggatgacagaatctatgcttgcatggatgccatagttcctggaaatgttccatctgcatgtttgagagaggcattggatcaagccagagtcaagcctggagacatcgagatgttggagctttctgctgattcagcgaggcatttgaaggacccgtctgttctcccaaaggaactcactgctgaggaagagattggcggacttcagacgattcttcgtgacgatgacaagctcccaaggaatgttgcaactggaagtgtcaaggccactgttggtgacactggttatgcttctggtgctgccagtttgattaaggctgcgctttgcatctacaaccgttacctgcccagcaatggagatgactgggatgaacctgcacctgaagcaccctgggacagcacactctttgcgtgccagacctcaagagcttggttgaagaaccctggtgagagacgttatgcggctgtttccggagtcagtgaaaccagaagttgctacagtgtgctgctttctgaagcagagggacactacgagagagagaacagaatcagtttggatgaggaagcacccaagctcattgtgttgagagcagactcccatgaagagattcttggaagattggacaagataagggaaaggttcttgcagcccacgggtgctgcacccagagagtctgaattgaaggcgcaagcccgtaggatctttcttgaactccttggtgagacccttgcccaagatgcagcttcatctggaagtcagaagccccttgctctcagcttggtctccactccatccaagctccagagagaggtggaacttgcggcaaaaggcattccgagatgtctcaagatgagacgtgattggagttcccctgctggaagcagatatgcgcctgagcctttggccagtgacagagttgccttcatgtatggagaaggaaggagcccttactatggcatcacacaagacattcataggatttggcctgaacttcatgaggtcatcaatgagaaaacaaaccgtctctgggctgaaggtgacagatgggtcatgccaagggccagcttcaagagtgagcttgagtcacaacagcaagagtttgacagaaacatgattgaaatgttccgtcttggaatcctcacctcaattgccttcacaaacctggcgagagatgttctcaacatcacgcccaaagcagcctttggactcagtttgggagagatttccatgatctttgctttctccaagaaaaacggtttgataagcgatcagttgacaaaggatttgagagagtcagatgtctggaacaaagctctggctgttgagttcaatgcgctcagagaagcctggggcattccacagtctgtcccaaaagatgagttctggcaaggttacatagtgaggggaacgaaacaagacatagaagcagccatagcaccagactcaaagtatgtgaggttgaccatcatcaatgatgccaacactgctctcatcagtggaaagcctgatgcatgcaaagctgcgattgctcgtcttggtggcaacatccctgcgcttccagtcactcaaggcatgtgtgggcattgcccagaggtgggaccttacaccaaggacatcgcaaagatccacgccaaccttgagttccctgtggttgatggtcttgatctctggactaccataaaccagaagaggcttgtgccaagagccacgggtgccaaagatgaatgggctccttcatcctttggggagtatgctggacagctctatgagaaacaagccaacttccctcagatagttgaaaccatctacaagcagaactatgatgtgtttgttgaagttgggccaaacaatcacagaagcacagcagtgagaaccacgcttggaccacagagaaaccaccttgctggtgccatagacaagcagaacgaggatgcttggacgacaatagtcaagctcgtggcttcattgaaggctcaccttgttcctggagtgaccatcagtccgctctaccactccaagctcgttgcagaggctgaggcttgttatgctgcgctctgtaaaggtgagaaacccaagaaaaacaagtttgtgagaaagattcagttgaatggcagattcaacagcaaggcagaccccatctcctcagcagaccttgcatccttcccacctgcggaccctgcgattgaagctgccatctcttcaaggatcatgaagcctgtggctccgaaattctatgcgcgtctcaacattgatgagcaagatgagaccagagatccgatcttgaacaaggacaatgcgccttccagctccagctcttccagcagttcctcttccagcagttcatctccgtctcctgctccttcagctccagttcagaagaaagctgccccagctgcggagacaaaagctgttgccagtgctgatgcacttcgtagtgccctgcttgatcttgactccatgcttgcgctcagctctgcaagtgcttctggcaaccttgttgagactgcgccatctgatgccagtgtcattgtccctccgtgcaacattgctgatcttggcagcagagctttcatgaaaacttatggtgtttctgcgcctctgtacaccggtgcaatggccaagggaattgcctctgcggacttggtgatcgcagctggaaggcaaggaatccttgcgtcatttggtgctggaggccttccaatgcaagttgtgcgtgagtccattgaaaagattcaagctgccctgcccaatggaccatatgctgtcaacctcatccattctccttttgacagcaaccttgagaagggaaatgttgatctcttcttggaaaagggtgtcacttttgttgaggcttcagccttcatgacgttgacaccgcaagttgtcagatacagagcggctgggttgacgaggaatgcagatgggtcagtcaacataaggaacagaatcattgggaaagtctccagaactgagctggctgaaatgttcatgcgtcctgcacctgagcatcttttgcagaagctcattgcttctggggagatcaatcaagaacaagctgagttggccagacgtgttcctgtggctgatgacattgcggttgaagctgattctggtggacacactgacaaccgtccaatccatgtcattctgcctctgattatcaacctgagggataggcttcacagagagtgtggatacccagcaaacctgagggttcgtgttggtgctgggggtggcattgggtgtccccaagctgcgctggcaactttcaacatgggtgcctctttcattgtcactggaacagtgaaccaagttgccaaacaatctgggacgtgtgacaatgtgaggaaacagcttgcgaaagcaacttactcagatgtttgcatggcaccggcagctgacatgtttgaggaaggtgtgaaacttcaagttttgaagaaaggaacaatgttcccttcaagagccaacaaactctatgagttgttctgcaagtatgattcttttgagtccatgcctccagcagagcttgcgagggttgagaaaagaatcttcagtcgtgcattggaagaggtctgggatgagaccaagaacttctacatcaaccgtctccacaacccagagaagatacagagggctgagagggaccccaaactgaagatgtcactgtgtttcagatggtatctgtccctggcttcaaggtgggccaacactggagcttctgacagagtcatggactaccaagtttggtgtggtcctgccattggttcattcaatgatttcatcaaaggaacttaccttgatccggcagtggcaaatgagtacccgtgtgttgtgcagatcaacaaacagattcttagaggagcgtgcttcttgaggcgtcttgaaatactgagaaatgcaaggctttcagatggtgcagctgcacttgtggcgagcattgatgacacatatgtccctgctgagaagctgtgagtagttagcttaatcacttaggtcacccagtccaagcccggcctagcacgatgatcatgagtgttgctattgatgtatgttaatactatacacagtcatcgtgtgtgttttataaaactgtaagcttaggatgtttgaggctaatgtaattagcactacaccgtaataaatgagaggtttactttatgttttaataatgttcttacccttgctgctctctaaactgtaatggcgtacggttagctaaactaaagtaaaaatcgattcgcttgagtaaaattagtgaccgggaaagatcatcgactactactgctcagagatgtaatcggtaattaagacttcaagctcaataattaattaggagtaaatctggcttcgaatttttaaattgtcaacttccaaagaaggattggcaagactcaatctcaattgcccaacaaacatatggctctttacaaatttggaatctctttttgatggcaagaacgtcgtaattcctctgtcgatctcatgtaattaccaaactcatctacttattactttctttatatgcacttactgatgcggccgcttaattaatctgacctgaccactagacctgagtgagtacagatgtgctactagtgctagcctcgaggtcgaccaacttttctatacaaagttgtctagacctaggactaggcactgagtgactcactgacctgactgagtgactggcggccgcagcttatagtaaagatttttttgttaataaaatgaaagttaatatttatggatttatttgaacatatttacaagtttttgttaataaatttatttacagaagtgttaaatttgaaaatgtgttaaatgagagttaatatttatggatataatattactttatttaaaaataaaatgaatttatattaaaatatgatttggtaaaagatattataaagaggaacttggatgagaaagacgacgatgggcaaaagttgcatggcacaccgcttttgttcagtaacatctgcactgtggcgcctttttcacactcaccatgcatgctgccacgtcagctttcacactatgacaccactggccatacacgttgccacctcagctttctcctcttctcactatgacacgactggccatgcatgcatgcatgctgccacctcagctcccgcctcttcacccgtgtctttctctcatgtcgcagtgctgcgtgccaacctcttctctctataaatagagagaagagaatgatggttaaactcaaaccaaaacaagaaaacatacacaaatagcaaaacggatccacaaccaaaaatggcgcttcgtgtcaagaccaacaagaagccatgttgggagatgaccaaggaggaactgacctctggcaaaactgaggtgttcaactatgaggaactcctggagtttgcagagggtgacatagctaaggtttttggtccggagtttgctgtcatagacaagtaccccagaagggtgaggctgcctgctcgtgaatacctgcttgtgacaagggtcacactcatggatgccgaggtcaacaactacagagttggtgccagaatggtcactgagtatgatcttccagtgaatggcgaattgtctgagggaggtgattgtccctgggcagttctggttgagagtggacagtgcgatttgatgctgatatcatacatgggaattgatttccagaaccaaggtgacagagtttaccgtctgctcaacaccacgttgacattctatggggttgcccatgagggagagacccttgagtatgacatcagagtgaccggttttgccaaacgtttggatggtggcatctccatgttcttctttgagtatgactgctatgtcaatgggaggcttctcattgagatgagagatggctgtgctggcttcttcacaaatgaggagcttgatgcgggaaagggtgtggtgttcacaagaggggatttggctgccagagctaagattccaaagcaagatgtttctccctatgctgtcgctccctgccttcacaaaacaaaactcaacgaaaaggagatgcagaccttggttgacaaagattgggcttccgtttttggctcaaagaatggcatgccggagatcaactacaaactctgcgcacgtaagatgctcatgattgatagagtcaccagcattgaccataagggaggtgtgtacggtttgggtcagttggttggtgagaaaatcttggagagggaccattggtacttcccatgccattttgttaaggatcaagtcatggctggatctcttgtcagcgacggttgttcacaaatgctcaagatgtacatgatctggctcggtttgcaccttaccaccggaccatttgacttcagacccgtcaacggacacccgaacaaagttaggtgtaggggtcagatatctcctcataagggaaagttggtctacgtcatggagatcaaagagatgggattcgacgaggataacgatccgtacgccattgctgacgtcaacatcattgacgttgatttcgaaaagggtcaagatttcagccttgatagaatcagcgactacggaaagggggatcttaacaaaaagatcgtcgtggacttcaagggcattgctctcaagatgcagaagagatccacgaacaagaacccctccaaagttcagcccgtttttgctaacggtgcagccactgtgggaccggaagcgtccaaggccagctctggtgccagtgctagtgcttctgctgcccctgcgaagcctgctttctcagcagatgttcttgcgccaaagccagttgcacttcctgaacatatcctcaagggtgacgctctcgctccgaaagaaatgtcctggcatcccatgtcaaaacttcctggcaacccgacgccgttcttctcccctagttcttaccctccgagggcaatttgcttcatccctttccctggcaacccacttgacaacaattgcaaagctggagaaatgcctctgaactggtacaacatgtcagagttcatgtgtggaaaagttagcaactgcttgggaccagagttcgcaagatttgataagtcaaatacgagcagaagccctgcttttgatttggctcttgtgactagagttgttgaagtcacaaacatggaacatggcaagttcctgaatgttgattgcaatcccagcaaaggcacaatggtgggggagtttgactgtcctcaagatgcgtggttctttgatggttcttgcaatgatgggcacatgccttattccatcatcatggaaatcggacttcagacatccggtgttctcaccagtgtgttgaaagcaccactgacgatggacaaagatgacattctctttaggaaccttgatgcaagtgctgaaatggtgaggccagatgtggatgtgagggggaaaaccataaggaatgtgaccaagtgcactggatatgcaatgttgggaaagatggggattcacagattcacgtttgagttgtctgttgatggcgtggttttctacaaaggaagcacttcctttggatggttcactccagaggtgtttgctcagcaagctggacttgacaatgggaaaaagacggagccttggtgcaaaactaacaacacgagtgtgagaagagttgaaatcgcatcagccaaaggcaaagaacagctgactgagaaacttccagatgcaactaatgctcaagttctcagaaggtcagaacagtgtgagtatttggattacctcaacattgctcctgattctgggctgcatgggaaaggatatgcgcatggacacaaagatgttaacccacaagactggttcttctcttgtcacttttggtttgatcctgtgatgcctggatctttgggaattgagtcaatgttccagctcattgaggcatttgcggtggaccagaacataccgggagaatacaatgtgagcaatccgacctttgcccatgcccctggaaaaacggcgtggaagtaccgtggtcaattgacaccaaagaaccgtgcgatggactgtgaggtgcacatagtttcaatcacagcctctcctgaaaatggaggctacgttgacatagtggcagatggagcactttgggttgatggtctccgtgtgtatgaagccaaagaactcagagttcgtgttgtcagtgcaaaacctcaagccattccggatgttcaacaacagccacccagcgcaaaagcggaccctgggaaaactggagttgcactcagtccgactcagttgagagatgtcctgcttgaagtggacaatccattgtatcttggtgttgaaaactccaatttggtgcagtttgaatccaaacctgcaacttcttcaaggattgtcagtatcaaaccatgctccataagtgatcttggtgacaagtccttcatggaaacgtacaatgtgtcagcacctctgtacactggagcaatggccaagggaattgcgtctgcggaccttgtcattgctgctgggaagaggaagatattgggttcttttggagcgggtgggcttccaatgcaccatgtgagggcagctttggagaagatacaagcggctctgcctcaaggaccatatgctgtgaacctcattcattcaccttttgacagcaacttggaaaaggggaatgttgatctcttcctcgaaaagggcgttactgtggtggaggcttctgcattcatgaccctcactccccaagttgttcgttaccgtgcagccggactctcaaggaacgctgatgggagtgtcaacatcagaaaccgtatcattggaaaagtgtccagaacagaactcgccgaaatgttcatcagaccggctccggaacacctccttgagaaactcatagcttctggtgagataacacaagaacaagccgaacttgcccgtcgtgttcctgtcgcagacgacatcgctgttgaagctgattctggtggtcacactgacaaccgtcccatccacgtcatcttgcctttgatcatcaaccttaggaacagactgcacagagagtgtggttatcctgcgcaccttagagtcagagttggagctggaggcggtgttggctgcccacaagctgctgcggctgccctcacaatgggagctgccttcatagtgactgggactgtcaatcaagttgctaaacagtccgggacatgtgacaacgtgagaaaacaactcagtcaagccacctacagtgacatttgcatggctccagcagctgatatgtttgaggaaggtgtgaaactccaagttctcaagaagggaacaatgttcccatcaagagctaacaaattgtacgaactcttttgcaagtacgactctttcgattcaatgcctcctgctgaacttgaaaggatcgagaagaggatcttcaagagggcacttcaagaggtctgggaagagaccaaggacttttacatcaatggtttgaagaatccagagaagatacagagagcggaacatgaccccaaactcaagatgtctttgtgtttcagatggtatcttggtcttgcatcacgttgggccaacatgggtgctcctgatcgtgtcatggactatcaagtctggtgtggtccagccattggagccttcaatgacttcatcaaaggaacatatcttgatcctgctgtctctaatgagtacccatgtgttgtccagatcaaccttcagattttgcgtggtgcatgttacctgaggcgtcttaatgctctgagaaatgatccgaggattgatcttgagactgaagatgctgcctttgtctatgagccaacgaatgcgctttgagtagttagcttaatcacttaggtcacccagtccaagcccggcctagcacgatgatcatgagtgttgctattgatgtatgttaatactatacacagtcatcgtgtgtgttttataaaactgtaagcttaggatgtttgaggctaatgtaattagcactacaccgtaataaatgagaggtttactttatgttttaataatgttcttacccttgctgctctctaaactgtaatggcgtacggttagctaaactaaagtaaaaatcgattcgcttgagtaaaattagtgaccgggaaagatcatcgactactactgctcagagatgtaatcggtaattaagacttcaagctcaataattaattaggagtaaatctggcttcgaatttttaaattgtcaacttccaaagaaggattggcaagactcaatctcaattgcccaacaaacatatggctctttacaaatttggaatctctttttgatggcaagaacgtcgtaattcctctgtcgatctcatgtaattaccaaactcatctacttattactttctttatatgcacttactgatgcggccgcttaattaatcacgagtggatgactgtcacgactgactcatgactgactactagtgctagcctcgaggtcgacacaactttgtataataaagttgtctagacctaggcgagtcatgagtcgtgacatgacgtcatgctcatcagactgcggccgcagcttatagtaaagatttttttgttaataaaatgaaagttaatatttatggatttatttgaacatatttacaagtttttgttaataaatttatttacagaagtgttaaatttgaaaatgtgttaaatgagagttaatatttatggatataatattactttatttaaaaataaaatgaatttatattaaaatatgatttggtaaaagatattataaagaggaacttggatgagaaagacgacgatgggcaaaagttgcatggcacaccgcttttgttcagtaacatctgcactgtggcgcctttttcacactcaccatgcatgctgccacgtcagctttcacactatgacaccactggccatacacgttgccacctcagctttctcctcttctcactatgacacgactggccatgcatgcatgcatgctgccacctcagctcccgcctcttcacccgtgtctttctctcatgtcgcagtgctgcgtgccaacctcttctctctataaatagagagaagagaatgatggttaaactcaaaccaaaacaagaaaacatacacaaatagcaaaacggatccacaaccaaaaatggctcccactcccgacgccaccgcgcctctgaacaagccgagcgactatgccgtctaccacgaggaagacggccccttctggaccgccgattccagcggcgtctcgcgcgtgaactttagcgagaccggcgtgggatccgagggcgtcatccctgcgctcacgctcatcgacgtcttcgagagggccgtcaagcgcggcggaaacaggatcgccttccgcacggaaaacatgcccacgctccgccgcggcgaagaggccccggacgcgctgccgctcaaggactggaagtcctggtcctggaaacagtacaaggccgacgtccaccgcatcgccagggctctcatggacctcggcgttgagcagcacgacgccgtctcgatttttggctttaactcgcccgaatggtttctcagtgccgtcggcgccgtgcacgcaggtgccaagattgccggtatttacccctcagacacgcccgcccaggtccagtacaaggccttccacagtgacaccgctgttgccgttgtcgaaaacgagcagtgcttcaagaagttcgccgaggtcgtcgaggaccttccttacctcaaggccattgtttgctgggactatgaagccacagacatcacgcgcgaggacggctccgtcgtcgaggtcctcacctttgccgagttcctcaagcgcggcgacaccgtcgaggcggccgcccttgacgagcgcatctccaagatcgagcccaccatgtgcgctgcccttatttacaccagcggtactaccggccgccccaaggccgttatgatttcgcacgacaaccttgttttcgaggccagcgccgtcgtccccaacctcggaggagcctgtacgaccactgctgaggagcgcattctctcgtacctgcctctctcgcacgtcgctggtatgatggttgatattattgcccccatcattgccaccgccttccacaagggccgcatctgcgtctgctttgctcgcccgtacgatttgcgcaccggcacgctgggccagcgcctcaacgccgtggagcccaccatcttccttggcgtgccccgtgtgtgggaaaagattcaggaaaagctcatggccgtcggtgccaaaaccaccggcctcaagaagaagctctctacggccgccaagaagcgtggtcttgaattccaggaggagcagcaaatcggccgctccggtgccaaccctggctttggcccccttggcatctacaagaagctcctcggcctcatcaagggcaagctgggcctcaccaagtgcaagtttgcctttgctggtgccgcgcccatgacccgtgagacccttcagtactttggcgcgctgaacatcaacattaacgaggtctacggcatgtcagagtgctccggtgccgccacctggtccacggacaaggcccacgagtggggcactgttggctacgagatgcccagttgcgaggtccgcgtcttcaagattgccgaggacggtaccaagaccgagtgcccgcgcgccgccgacattatgcatgctaccgaggaggagcagggcgaagtttgcttccgcggccgtaacatcatgatgggctaccttgccaaccccaagcttggcgacgaccacgttgccgagatcgaggagaagaacgctgccgctatcgactccgagggctggctccacagtggtgataagggcgccatttctacccgcggcatgctcaagatcacgggccgctacaaggagctcatcatcggcgccggtggcgagaacgtggcgcccgtccctattgaggacgccatcaaggcgcgcatgccttttgtttccaacgccatgatggtcggagataagcgcaagttcatggctgtcctccttaccctcaagacggttggcgccacgggcgagcttcccggtacgaacaagctcatgggcgctgccgccgactacggtgagaccatcgaggacgcctgcgacaacgaggcgctcattgaggagatcacgcagcagctcaaggagatcggtgatgatggcgatgtcacgccctcgaacgcggctcgcatccaaaagttcaccattctcccgctcgacttttccgtctccacggacgagctcacggccacgctcaagctcaagcgctccgtggtcgcagacaagtacgaagacatcatcgaggccttttacgagtccaagagcgtttttgtgccgtactcgaccgttggcgcctacgccacgggcggcccggtcgacgactccgttgtcgatggctcattcaagggcgactttagcatgattggcgacgatgatccggatcttcaaaacgtcgatgtcctcgaggcgattgacgaggacaattaagtagttagcttaatcacttaggtcacccagtccaagcccggcctagcacgatgatcatgagtgttgctattgatgtatgttaatactatacacagtcatcgtgtgtgttttataaaactgtaagcttaggatgtttgaggctaatgtaattagcactacaccgtaataaatgagaggtttactttatgttttaataatgttcttacccttgctgctctctaaactgtaatggcgtacggttagctaaactaaagtaaaaatcgattcgcttgagtaaaattagtgaccgggaaagatcatcgactactactgctcagagatgtaatcggtaattaagacttcaagctcaataattaattaggagtaaatctggcttcgaatttttaaattgtcaacttccaaagaaggattggcaagactcaatctcaattgcccaacaaacatatggctctttacaaatttggaatctctttttgatggcaagaacgtcgtaattcctctgtcgatctcatgtaattaccaaactcatctacttattactttctttatatgcacttactgatgcggccgcttaattaatctgatcatggatgctacgtcacggcagtacaggactatccctaggagctgtgctgggtaactcacatgagtcactggtcacatcagcggccgcagcttatagtaaagatttttttgttaataaaatgaaagttaatatttatggatttatttgaacatatttacaagtttttgttaataaatttatttacagaagtgttaaatttgaaaatgtgttaaatgagagttaatatttatggatataatattactttatttaaaaataaaatgaatttatattaaaatatgatttggtaaaagatattataaagaggaacttggatgagaaagacgacgatgggcaaaagttgcatggcacaccgcttttgttcagtaacatctgcactgtggcgcctttttcacactcaccatgcatgctgccacgtcagctttcacactatgacaccactggccatacacgttgccacctcagctttctcctcttctcactatgacacgactggccatgcatgcatgcatgctgccacctcagctcccgcctcttcacccgtgtctttctctcatgtcgcagtgctgcgtgccaacctcttctctctataaatagagagaagagaatgatggttaaactcaaaccaaaacaagaaaacatacacaaatagcaaaacggatccacaaccaaaaatgcttcagcacacttggcttccgaagcctcccaatctgaccctcttgtcagatgaggttcatctctggaggattcctcttgaccagcctgagtcacaacttcaagaccttgctgccaccctgagcagtgatgaattggcgagggcaaacagattctactttccagaacacagaaggcgtttcactgctgggagaggcatcctcagatccatcttgggtggatacttgggagtggaaccgggtcaagtcaagtttgattatgagtcccgtgggaaaccgatccttggtgacagatttgctgagagtggactcctgttcaacttgtctcacagccagaaccttgccttgtgtgctgtcaactacacgcgtcaaataggcattgatcttgaatatctgcgtccaacatctgacttggagtctcttgcaaagaggttctttctcccaagagaatatgaactcttgaggtcactccctgatgagcagaaacagaagattttctttcgttactggacttgcaaagaggcttatctcaaagcaacgggagatggaatagccaaacttgaagagatcgagatagcactcaccccaacagaacctgccaagctccaaacagctcctgcgtggtctctgttggagcttgtgccagatgacaattgtgttgcagctgtggctgttgcgggttttggttggcagcccaagttctggcattactgagtagttagcttaatcacttaggtcacccagtccaagcccggcctagcacgatgatcatgagtgttgctattgatgtatgttaatactatacacagtcatcgtgtgtgttttataaaactgtaagcttaggatgtttgaggctaatgtaattagcactacaccgtaataaatgagaggtttactttatgttttaataatgttcttacccttgctgctctctaaactgtaatggcgtacggttagctaaactaaagtaaaaatcgattcgcttgagtaaaattagtgaccgggaaagatcatcgactactactgctcagagatgtaatcggtaattaagacttcaagctcaataattaattaggagtaaatctggcttcgaatttttaaattgtcaacttccaaagaaggattggcaagactcaatctcaattgcccaacaaacatatggctctttacaaatttggaatctctttttgatggcaagaacgtcgtaattcctctgtcgatctcatgtaattaccaaactcatctacttattactttctttatatgcacttactgatgcggccgcttaattaactactgtcactgaggccgtagacgagtacggactgatctaactagtgctagcctcgaggtcgacacccagctttcttgtacaaagtggttgcggccgcttaattaaatttaaattcaattaatgcaatcttgattttcaacaacgaaggtaatggcgtaaaagaaaaaatgtatgttattgtattgatctttcatgatgttgaagcgtgccataatatgatgatgtataattaaaatattaactgtcgcattttattgaaatggcactgttatttcaaccatatctttgattctgttacatgacacgactgcaagaagtaaataatagacgccgttgttaaagaattgctatcatatgtgcctaactagagggaatttgagcgtcagacctaatcaaatattacaaaatatctcactctgtcgccagcaatggtgtaatcagcgcagacaaatggcgtaaagatcgcggaaaaacctccccgagtggcatgatagctgcctctgtattgctgatttagtcagccttatttgacttaagggtgccctcgttagtgacaaattgctttcaaggagacagccatgccccacactttgttgaaaaacaaattgcctttggggagacggtaaagccagttgctcttcaataaggaatgtcgaggaggcaatgtaaccgcctctggtagtacacttctctaatccaaaaatcaatttgtattcaagataccgcaaaaaacttatggtttaaaccctgcaggactagtccagaaggtaattatccaagatgtagcatcaagaatccaatgtttacgggaaaaactatggaagtattatgtaagctcagcaagaagcagatcaatatgcggcacatatgcaacctatgttcaaaaatgaagaatgtacagatacaagatcctatactgccagaatacgaagaagaatacgtagaaattgaaaaagaagaaccaggcgaagaaaagaatcttgaagacgtaagcactgacgacaacaatgaaaagaagaagataaggtcggtgattgtgaaagagacatagaggacacatgtaaggtggaaaatgtaagggcggaaagtaaccttatcacaaaggaatcttatcccccactacttatccttttatatttttccgtgtcatttttgcccttgagttttcctatataaggaaccaagttcggcatttgtgaaaacaagaaaaaatttggtgtaagctattttctttgaagtactgaggatacaacttcagagaaatttgtaagtttgtaggtaccagatctggatcccaaaccatgtctccggagaggagaccagttgagattaggccagctacagcagctgatatggccgcggtttgtgatatcgttaaccattacattgagacgtctacagtgaactttaggacagagccacaaacaccacaagagtggattgatgatctagagaggttgcaagatagatacccttggttggttgctgaggttgagggtgttgtggctggtattgcttacgctgggccctggaaggctaggaacgcttacgattggacagttgagagtactgtttacgtgtcacataggcatcaaaggttgggcctaggatctacattgtacacacatttgcttaagtctatggaggcgcaaggttttaagtctgtggttgctgttataggccttccaaacgatccatctgttaggttgcatgaggctttgggatacacagcccggggtacattgcgcgcagctggatacaagcatggtggatggcatgatgttggtttttggcaaagggattttgagttgccagctcctccaaggccagttaggccagttacccaaatctgagtagttagcttaatcacctagagctcgatcggcggcaatagcttcttagcgccatcccgggttgatcctatctgtgttgaaatagttgcggtgggcaaggctctctttcagaaagacaggcggccaaaggaacccaaggtgaggtgggctatggctctcagttccttgtggaagcgcttggtctaaggtgcagaggtgttagcgggatgaagcaaaagtgtccgattgtaacaagatatgttgatcctacgtaaggatattaaagtatgtattcatcactaatataatcagtgtattccaatatgtactacgatttccaatgtctttattgtcgccgtatgtaatcggcgtcacaaaataatccccggtgactttcttttaatccaggatgaaataatatgttattataatttttgcgatttggtccgttataggaattgaagtgtgcttgaggtcggtcgccaccactcccatttcataattttacatgtatttgaaaaataaaaatttatggtattcaatttaaacacgtatacttgtaaagaatgatatcttgaaagaaatatagtttaaatatttattgataaaataacaagtcaggtattatagtccaagcaaaaacataaatttattgatgcaagtttaaattcagaaatatttcaataactgattatatcagctggtacattgccgtagatgaaagactgagtgcgatattatggtgtaatacataggaattcgtttaaacgatctgcgtctaattttcggtccaacttgcacaggaaagacgtcgaccgcggtagctcttgcccagcagactgggcttccagtcctttcgctcgatcgggtccaatgttgtcctcagctgtgaaccggaagcggacgaccaacagtggaagaactgaaaggaacgagccgtctataccttgatgatcggcctctggtgaagggtatcatcgcagccaagcaagctcatgaaaggctgatgggggaggtgtataattatgaggcccacggcgggcttattctttagggaggatctatctcgttgctcaagtgcatggcgcaaagcagttattggagtgcggattttcgttggcatattattcgccacgagttagcagacgaagagaccttcatgaacgtggccaaggccagagttaagcagatgttacgccctgctgcaggcctttctattatccaatagttggttgatctttggaaagagcctcggctgaggcccatactgaaagagatcgatggatatcgatatgccatgttgtttgctagccagaaccagatcacatccgatatgctattgcagcttgacgcagatatggaggataagttgattcatgggatcgctcaggagtagctcatccatgcacgccgacaagaacagaaattccgtcgagttaacgcagccgcttacgacggattcgaaggtcatccattcggaatgtattagtttgcaccagctccgcgtcacacctgtcttcatttgaataagatgttagcaattgtttttagctttgtcttgttgtggcagggcggcaagtgcttcagacatcattctgttttcaaattttatgctggagaacagcttcttaattcctttggaaataatagactgcgtcttaaaattcagatgtctggatatagatatgattgtaaaataacctatttaagtgtcatttagaacataagttttatgaatgttcttccattttcgtcatcgaacgaataagagtaaatacaccttttttaacattacaaataagttcttatacgttgtttatacaccgggaatcatttccattattttcgcgcaaaagtcacggatattcgtgaaagcgacataaactgcgaaatttgcggggagtgtcttgagtttgcctcgaggctagcgcatgcacatagacacacacatcatctcattgatgcttggtaataattgtcattagattgtttttatgcatagatgcactcgaaatcagccaattttagacaagtatcaaacggatgtgacttcagtacattaaaaacgtccgcaatgtgttattaagttgtctaagcgtcaatttgatttacaattgaatatatcctgccccagccagccaacagctcgatttacaattgaatatatcctgccggccggcccacgcgtgtcgaggaattctgatctggcccccatttggacgtgaatgtagacacgtcgaaataaagatttccgaattagaataatttgtttattgctttcgcctataaatacgacggatcgtaatttgtcgttttatcaaaatgtactttcattttataataacgctgcggacatctacatttttgaattgaaaaaaaattggtaattactctttctttttctccatattgaccatcatactcattgctgatccatgtagatttcccggacatgaagccatttacaattgaatatatcctgccgccgctgccgctttgcacccggtggagcttgcatgttggtttctacgcagaactgagccggttaggcagataatttccattgagaactgagccatgtgcaccttccccccaacacggtgagcgacggggcaacggagtgatccacatgggacttttaaacatcatccgtcggatggcgttgcgagagaagcagtcgatccgtgagatcagccgacgcaccgggcaggcgcgcaacacgatcgcaaagtatttgaacgcaggtacaatcgagccgacgttcacgcggaacgaccaagcaagcttggctgccatttttggggtgaggccgttcgcggccgaggggcgcagcccctggggggatgggaggcccgcgttagcgggccgggagggttcgagaagggggggcaccccccttcggcgtgcgcggtcacgcgcacagggcgcagccctggttaaaaacaaggtttataaatattggtttaaaagcaggttaaaagacaggttagcggtggccgaaaaacgggcggaaacccttgcaaatgctggattttctgcctgtggacagcccctcaaatgtcaataggtgcgcccctcatctgtcagcactctgcccctcaagtgtcaaggatcgcgcccctcatctgtcagtagtcgcgcccctcaagtgtcaataccgcagggcacttatccccaggcttgtccacatcatctgtgggaaactcgcgtaaaatcaggcgttttcgccgatttgcgaggctggccagctccacgtcgccggccgaaatcgagcctgcccctcatctgtcaacgccgcgccgggtgagtcggcccctcaagtgtcaacgtccgcccctcatctgtcagtgagggccaagttttccgcgaggtatccacaacgccggcggccgcggtgtctcgcacacggcttcgacggcgtttctggcgcgtttgcagggccatagacggccgccagcccagcggcgagggcaaccagcccggtgagcgtcggaaagggtcgacggatcttttccgctgcataaccctgcttcggggtcattatagcgattttttcggtatatccatcctttttcgcacgatatacaggattttgccaaagggttcgtgtagactttccttggtgtatccaacggcgtcagccgggcaggataggtgaagtaggcccacccgcgagcgggtgttccttcttcactgtcccttattcgcacctggcggtgctcaacgggaatcctgctctgcgaggctggccggctaccgccggcgtaacagatgagggcaagcggatggctgatgaaaccaagccaaccaggaagggcagcccacctatcaaggtgtactgccttccagacgaacgaagagcgattgaggaaaaggcggcggcggccggcatgagcctgtcggcctacctgctggccgtcggccagggctacaaaatcacgggcgtcgtggactatgagcacgtccgcgagctggcccgcatcaatggcgacctgggccgcctgggcggcctgctgaaactctggctcaccgacgacccgcgcacggcgcggttcggtgatgccacgatcctcgccctgctggcgaagatcgaagagaagcaggacgagcttggcaaggtcatgatgggcgtggtccgcccgagggcagagccatgacttttttagccgctaaaacggccggggggtgcgcgtgattgccaagcacgtccccatgcgctccatcaagaagagcgacttcgcggagctggtattcgtgcagggcaagattcggaataccaagtacgagaaggacggccagacggtctacgggaccgacttcattgccgataaggtggattatctggacaccaaggcaccaggcgggtcaaatcaggaataagggcacattgccccggcgtgagtcggggcaatcccgcaaggagggtgaatgaatcggacgtttgaccggaaggcatacaggcaagaactgatcgacgcggggttttccgccgaggatgccgaaaccatcgcaagccgcaccgtcatgcgtgcgccccgcgaaaccttccagtccgtcggctcgatggtccagcaagctacggccaagatcgagcgcgacagcgtgcaactggctccccctgccctgcccgcgccatcggccgccgtggagcgttcgcgtcgtctcgaacaggaggcggcaggtttggcgaagtcgatgaccatcgacacgcgaggaactatgacgaccaagaagcgaaaaaccgccggcgaggacctggcaaaacaggtcagcgaggccaagcaggccgcgttgctgaaacacacgaagcagcagatcaaggaaatgcagctttccttgttcgatattgcgccgtggccggacacgatgcgagcgatgccaaacgacacggcccgctctgccctgttcaccacgcgcaacaagaaaatcccgcgcgaggcgctgcaaaacaaggtcattttccacgtcaacaaggacgtgaagatcacctacaccggcgtcgagctgcgggccgacgatgacgaactggtgtggcagcaggtgttggagtacgcgaagcgcacccctatcggcgagccgatcaccttcacgttctacgagctttgccaggacctgggctggtcgatcaatggccggtattacacgaaggccgaggaatgcctgtcgcgcctacaggcgacggcgatgggcttcacgtccgaccgcgttgggcacctggaatcggtgtcgctgctgcaccgcttccgcgtcctggaccgtggcaagaaaacgtcccgttgccaggtcctgatcgacgaggaaatcgtcgtgctgtttgctggcgaccactacacgaaattcatatgggagaagtaccgcaagctgtcgccgacggcccgacggatgttcgactatttcagctcgcaccgggagccgtacccgctcaagctggaaaccttccgcctcatgtgcggatcggattccacccgcgtgaagaagtggcgcgagcaggtcggcgaagcctgcgaagagttgcgaggcagcggcctggtggaacacgcctgggtcaatgatgacctggtgcattgcaaacgctagggccttgtggggtcagttccggctgggggttcagcagccagcgctttactggcatttcaggaacaagcgggcactgctcgacgcacttgcttcgctcagtatcgctcgggacgcacggcgcgctctacgaactgccgataaacagaggattaaaattgacaattgtgattaaggctcagattcgacggcttggagcggccgacgtgcaggatttccgcgagatccgattgtcggccctgaagaaagctccagagatgttcgggtccgtttacgagcacgaggagaaaaagcccatggaggcgttcgctgaacggttgcgagatgccgtggcattcggcgcctacatcgacggcgagatcattgggctgtcggtcttcaaacaggaggacggccccaaggacgctcacaaggcgcatctgtccggcgttttcgtggagcccgaacagcgaggccgaggggtcgccggtatgctgctgcgggcgttgccggcgggtttattgctcgtgatgatcgtccgacagattccaacgggaatctggtggatgcgcatcttcatcctcggcgcacttaatatttcgctattctggagcttgttgtttatttcggtctaccgcctgccgggcggggtcgcggcgacggtaggcgctgtgcagccgctgatggtcgtgttcatctctgccgctctgctaggtagcccgatacgattgatggcggtcctgggggctatttgcggaactgcgggcgtggcgctgttggtgttgacaccaaacgcagcgctagatcctgtcggcgtcgcagcgggcctggcgggggcggtttccatggcgttcggaaccgtgctgacccgcaagtggcaacctcccgtgcctctgctcacctttaccgcctggcaactggcggccggaggacttctgctcgttccagtagctttagtgtttgatccgccaatcccgatgcctacaggaaccaatgttctcggcctggcgtggctcggcctgatcggagcgggtttaacctacttcctttggttccgggggatctcgcgactcgaacctacagttgtttccttactgggctttctcagcccccgagcgcttagtgggaatttgtaccccttatcgaaccgggagcacaggatgacgcctaacaattcattcaagccgacaccgcttcgcggcgcggcttaattcaggagttaaacatcatgagggaagcggtgatcgccgaagtatcgactcaactatcagaggtagttggcgtcatcgagcgccatctcgaaccgacgttgctggccgtacatttgtacggctccgcagtggatggcggcctgaagccacacagtgatattgatttgctggttacggtgaccgtaaggcttgatgaaacaacgcggcgagctttgatcaacgaccttttggaaacttcggcttcccctggagagagcgagattctccgcgctgtagaagtcaccattgttgtgcacgacgacatcattccgtggcgttatccagctaagcgcgaactgcaatttggagaatggcagcgcaatgacattcttgcaggtatcttcgagccagccacgatcgacattgatctggctatcttgctgacaaaagcaagagaacatagcgttgccttggtaggtccagcggcggaggaactctttgatccggttcctgaacaggatctatttgaggcgctaaatgaaaccttaacgctatggaactcgccgcccgactgggctggcgatgagcgaaatgtagtgcttacgttgtcccgcatttggtacagcgcagtaaccggcaaaatcgcgccgaaggatgtcgctgccgactgggcaatggagcgcctgccggcccagtatcagcccgtcatacttgaagctaggcaggcttatcttggacaagaagatcgcttggcctcgcgcgcagatcagttggaagaatttgttcactacgtgaaaggcgagatcaccaaggtagtcggcaaataatgtctaacaattcgttcaagccgacgccgcttcgcggcgcggcttaactcaagcgttagagagctggggaagactatgcgcgatctgttgaaggtggttctaagcctcgtcttgcgatggcatttcgatccattcccattccgcgctcaagatggcttcccctcggcagttcatcagggctaaatcaatctagccgacttgtccggtgaaatgggctgcactccaacagaaacaatcaaacaaacatacacagcgacttattcacacgagctca

SEQ ID NO: 46 - DNA, 34862 bp, Artificial sequence
  plasmid pDAB9166
aattacaacggtatatatcctgccagtcagcatcatcacaccaaaagttaggcccgaatagtttgaaattagaaagctcgcaattgaggtctacaggccaaattcgctcttagccgtacaatattactcaccggatcctaaccggtttaattaaggcgcgccatgcccgggcaagcggccgcacaagtttgtacaaaaaagcaggcttctagacctaggtggagtcatcacgcagactatctcagcatgtgcgtagcacgcggccgcgaattcggaaatgggccaagtgaaatggaaatagagcttcaatccatttagtcccactcaaaatggtgctcgaattatatttagttacgttcgaatcagacaaccaagtatttggttaataaaaaccactcgcaacaaaggaaaaacaccaagcgcgtgcgtccaacatccgacggaaggggggtaatgtggtccgaaaaccttacaaaaatctgacgtcatctacccccgaaaacgttgaatcgtcaacgggggtagttttcgaattatcttttttttaggggcagttttattaatttgctctagaaattttatgattttaattaaaaaaagaaaaagaatatttgtatatttattttttatactctttttttgtccaactatttctcttattttggcaactttaactagactagtaacttatgtcaatgtgtatggatgcatgagagtgagtatacacatgtctaaatgcatgccttatgaaagcaacgcaccacaaaacgaagacccctttacaaatacatctcatcccttagtaccctcttactactgtcccgacacaaactcaaaacaaggatccacaaccaaaaatggcagcgaggctgcaagagcagaaaggaggtgagatggacacgaggattgcgatcataggcatgagcgccatacttccttgtggaaccacggtgagagagtcatgggagaccataagggctggcattgattgcctgtctgatcttcctgaggatcgtgttgatgtgactgcgtactttgacccagtcaagaccacaaaggacaaaatctactgcaagagaggaggtttcattcctgagtatgactttgatgcgcgtgagtttggtctcaacatgttccagatggaagattctgatgcgaatcagaccatctcacttctcaaggtcaaagaagcacttcaagatgctgggattgatgcacttggaaaggagaagaaaaacataggatgcgtgcttggcattggaggtggacagaagagttcacatgagttctacagcagactcaactatgtggttgtggagaaagtcttgagaaagatggggatgccagaggaagatgtcaaagtggctgtggagaagtacaaagcgaacttcccagaatggagacttgactctttccctggattccttgggaatgtcactgctggcagatgcaccaacacattcaacttggatggcatgaactgcgttgtggatgctgcatgtgcaagctccttgatagcagtcaaggttgcgattgatgaactgctctatggtgactgcgacatgatggtcactggtgcaacctgcacagacaactccattgggatgtacatggctttctcaaagacacctgtgttcagcacggacccaagtgtgagagcgtatgatgagaaaacgaaagggatgctcattggtgagggatcagccatgttggtgctcaaacgttatgcagatgcagtgagggatggtgatgagattcatgctgtgattcgtggttgtgcaagctcaagtgatggcaaagcagctggcatctacactcccacaatcagtggtcaagaggaagccttgagacgtgcatacaatcgtgcctgcgttgaccctgccactgtcactttggttgagggtcatgggactggcactccagttggagataggattgagttgactgcgttgaggaacttgtttgacaaagcgtatggtgaagggaacacagagaaagttgcagttggaagtatcaagtccagtattggtcatttgaaggctgttgctggtcttgctggaatgatcaaggtcatcatggctctcaaacacaagactttgcctggaacgatcaatgtggacaatccacccaatctctatgacaacactcccatcaatgagtcatccctctacatcaacacgatgaacagaccctggttccctccacctggtgttccgagacgtgctggaatatccagctttggctttggaggtgccaactaccatgcagtgttggaagaggctgaaccagagcacacgacagcgtacagactcaacaaacgtccacaaccggtgttgatgatggctgcaactcctgctgcgttgcagagcctttgtgaagctcagctgaaagagtttgaagctgcgatcaaggagaatgagacagtcaagaatactgcctacatcaagtgtgtcaagtttggagaacagttcaagttccctgggagcatacctgcgaccaatgcgagactgggattcttggtcaaagatgcggaggatgcgtgctccacgcttcgtgctatatgtgctcagtttgccaaagatgtgaccaaagaagcgtggaggcttccgagagaaggagtttctttccgtgccaaaggcattgccaccaatggtgctgttgctgcactcttctctggacaaggtgctcagtacacacacatgttcagtgaagttgcgatgaactggcctcagttcagacagtccattgctgcaatggacgctgcacagtccaaggttgctggaagtgacaaagactttgaaagagtctctcaagtcctgtacccaaggaaaccgtacgaacgtgagccagaacaagatcacaagaaaatctcactcacagcatacagccagccgtcaaccctggcatgtgctcttggtgcctttgagattttcaaggaagctggattcactccagactttgcagctggacacagcttgggtgagtttgctgcgctctatgcagctggttgtgttgacagagatgagttgtttgaacttgtttgcagaagggcaaggatcatgggaggcaaagatgcacctgccacacccaaaggttgcatggcagctgtcataggacccaacgcagagaacatcaaggttcaagctgccaacgtctggcttggaaactcaaactctccgtctcagactgtcattactgggtctgttgaagggattcaagctgaaagtgccagattgcagaaggaagggttcagagttgtgcctcttgcttgtgagtctgccttccattctccacagatggaaaatgccagctcagctttcaaagatgtcatatccaaggtttccttccgtacacccaaagcagaaacaaagctcttcagcaatgtttctggagagacctatccgacggatgccagagagatgctcactcaacacatgacctcatctgtgaagttcctgacccaagtgaggaacatgcaccaagctggtgcgagaatctttgttgagtttggaccgaaacaagttctcagcaaacttgtttctgaaaccctcaaagatgacccgtctgttgtcacagtgtctgtgaacccagcttctggcacggactctgacatacagttgagggatgctgcagttcagctggttgtggctggtgtcaatcttcaagggtttgacaagtgggatgctcctgatgccacgaggatgcaagccatcaagaaaaagagaaccacactcagactttcagctgccacctatgtcagtgacaagaccaagaaagtgagggatgctgccatgaacgacggaagatgtgtcacatacctcaagggtgctgcaccactcatcaaggctcctgaacctgtggttgacgaagctgccaagagggaggctgaaaggcttcagaaggagcttcaagacgctcagaggcagcttgacgacgccaaacgtgcagctgcagaagccaactccaaacttgctgctgccaaggaggaagccaagactgctgcagcttcagccaagcctgcagttgacactgctgttgtggagaaacatcgtgccatcctcaagtccatgctggctgagctggatggttatggaagtgttgatgcttcttcccttcagcaacagcaacagcaacagactgctccggcgcctgttaaagccgctgcccctgccgctcccgttgcaagtgctcctgctcccgccgtgtccaacgagttgcttgagaaagctgagacagttgtgatggaggttctcgctgccaagactggatacgaaacagacatgattgaggcggacatggagcttgagactgagttgggaattgacagcatcaagagggttgaaattctttctgaagtccaagctatgcttaacgttgaggcgaaagatgttgatgctctctctaggacgagaacagtgggtgaagttgtcaacgctatgaaggcagaaatcgctggttcttccgctccggcgccggcagctgccgcacctgcaccggctaaagcggctccagctgcagctgcaccagctgtttctaatgagctgctcgaaaaggcagaaactgttgtgatggaagtccttgctgccaaaactggctacgaaactgacatgatagaatcagacatggagcttgagacggagcttggaattgattccatcaagcgtgtggaaatcctcagtgaagtccaagccatgctcaatgtggaagctaaggatgtggatgctctctcaaggaccagaactgtcggtgaggttgtcaatgccatgaaggctgagatagctggaggctccgctcctgcgccggccgctgccgctcctggtcccgctgccgcggctccagctccagctgcagccgctccggccgtctcaaacgaactccttgaaaaagctgagaccgtcgtgatggaggtcttggcagctaaaaccggctatgagactgacatgattgagtctgacatggaattggagacagaacttgggatagacagcatcaaacgtgttgaaatcctcagtgaggtccaagctatgctgaacgtggaagcgaaggatgttgatgctctgtccagaacgaggaccgttggtgaggttgtggatgccatgaaggctgaaattgctggagggtctgcgcccgcgccagctgcagccgctcctgcacccgcagccgcggcacctgctccagctgcacctgcacctgccgtttcttcagaactcttggagaaggctgagacggttgtgatggaggttttggctgcaaagactggctatgagaccgacatgattgaatctgatatggaattggagacagagcttgggatcgattccatcaaaagagtggagatcctgagtgaagtccaagccatgctcaatgttgaagctaaggatgttgatgcactttcaagaacaaggacagtgggtgaggttgtggatgccatgaaggcggagattgctggagggagcgcgcctgcgccagctgccgcggcacctgcaccggcagccgcagctccagctccagctgcaccagcaccggccgcgcccgcgccagctgtttcatccgaactcctggaaaaggccgagacggttgtgatggaggtgctcgcagctaagactggttacgagaccgacatgattgaaagtgacatggagcttgaaaccgagttgggaatagatagcatcaaacgtgttgaaatcttgtctgaggtccaagctatgttgaacgtggaggcaaaagatgtcgatgcgctttcaagaaccagaacagtcggtgaggtcgtggacgccatgaaggctgaaattgccggaagctctgctagtgcgccagctgcagccgcacctgcacctgctgccgcggcacctgctccagctgcagccgctcctgccgtcagcaatgagttgctggagaaagccgaaacagttgtgatggaagtccttgctgcaaaaactggttacgaaacggacatgattgagtcagacatggaattggagaccgaacttggaatagattccatcaagagagtggagatcctctctgaggtgcaagccatgctcaacgttgaggctaaagatgttgatgcactcagtaggacaagaactgtgggggaagttgtcgatgcgatgaaggctgagattgctggaggctctgctcctgcgccggcagctgccgcacctgcacccgcagccgcggcaccagctgtcagcaacgaattgcttgagaaggctgaaacagttgtcatggaagtgctggctgcaaaaaccggctatgagactgacatgattgagtctgacatggaacttgagacggaattgggcattgacagcatcaagcgtgttgagatcctcagtgaagtccaagcaatgctcaatgtggaggctaaggatgtggatgccctctcaaggaccagaacagttggtgaggtcgttgatgcgatgaaggcggagatcgctggaagttccgcgcctgcgccagctgcagccgctcctgcacccgcagccgcggcaccggctccagctgcagccgcaccggccgtctcctcagaactcctggaaaaggctgagacagttgtgatggaagtccttgctgcgaaaactggctatgagaccgacatgattgaatctgacatggaactggagaccgagcttggaattgactccatcaaacgtgttgaaatcctctctgaggttcaagcgatgttgaatgtggaggccaaagatgttgatgctctttccagaacaaggacggtgggagaggtggttgatgccatgaaggctgagatagctgggggttctgctcctgcgccagctgcagccgctcctgctcccgctgccgcggcaccagctgtcagcaacgaactccttgaaaaagctgaaactgttgtgatggaggttttggctgcaaagactggatacgagactgacatgatagagtcagacatggagttggaaacagagcttgggattgatagcatcaagcgtgtggaaatcctttctgaggttcaagccatgctgaacgttgaggccaaagatgtcgatgctttgtcaaggaccagaacggttggagaagtggtcgatgccatgaaggctgagatagctggtggatcagcccctgctccggctgcagccgctcctgcaagtgccggtgctgcaccagctgtgaagattgattcagttcatggtgctgactgtgacgatttgtcactgatgcacgcaaaggtggttgacatcagaaggccagatgaactgattctggaaagaccggagaaccgtccagttcttgtcgttgacgatggctcagagttgacacttgctcttgtgagggtgttgggagcctgtgcagttgtcttgacctttgagggattgcagttggctcagagagctggtgcagctgccattcgtcatgttctggctaaggacctttcagcagaatcagctgagaaggccatcaaagaggctgagcaaagatttggagcgttgggaggcttcataagccagcaagcagaaaggtttgaaccagctgagatactgggtttcacactcatgtgtgcgaagtttgccaaagcctctctctgcactgctgtggctggaggtcgtcctgccttcatcggtgtggctaggcttgacggcagacttggattcacctctcaaggcacttctgacgcactcaagagagcacagcgtggagcgatctttggactctgcaagacaatagggttggagtggtcagaatctgatgtgttcagccgtggtgtggacattgctcaagggatgcacccagaagatgctgcagttgccatagttagggagatggcgtgtgctgacatcagaatcagagaggttgggattggagcaaaccagcaaagatgcacaatcagagctgccaagttggagactgggaaccctcagagacagatagcgaaagacgatgtgcttctggtttctggaggtgctcgtgggatcacacctctttgcatccgtgagatcacgcgtcagattgctggaggcaagtacattctgttgggtcgtagcaaagtttctgcgtctgaaccagcatggtgtgctggcatcactgatgagaaggctgtgcagaaagctgccacccaagagttgaagagggccttcagtgctggtgaaggacccaaacccactccaagggctgtcacgaaacttgtgggatctgttcttggtgctcgtgaagtgagaagctccattgctgccattgaagctctgggtggcaaagcgatctacagctcttgtgatgtgaactctgctgcagatgttgccaaagcagttagggatgcagagtcccagcttggtgccagagttagtggaatcgttcacgcttctggtgtgctccgtgatcgtctcatagagaagaaactccctgacgagtttgatgctgtctttgggaccaaagtcactgggttggagaatcttctggctgcagttgatcgtgccaacctcaaacacatggttctcttcagctcccttgctggtttccacggcaatgttggtcagtctgactatgcgatggcaaacgaagctctcaacaagatgggtttggaacttgcgaaggatgtcagtgtcaagtccatctgctttggtccctgggatggtgggatggtgacacctcaactcaagaaacagtttcaagaaatgggagttcagatcattcctcgtgaaggaggtgctgatacagttgcgaggattgtgttgggatcaagtcctgctgagatccttgttggaaactggaggacaccatccaagaaagttggaagtgacacgatcaccctgcatagaaagatcagtgccaagtccaatcccttcttggaggatcatgtcatacaaggcagaagggtgttgccaatgacccttgctattgggagccttgctgagacctgccttggactcttccctggctactctctctgggccatagatgacgcacagctcttcaaaggtgtcactgttgatggagacgtcaactgtgaagtgaccctcacaccgtccactgctccgagtgggagggtgaatgtccaagcgacgctcaagacgttctcaagtggaaaacttgttccagcctacagagctgtcatagtgttgtccaaccaaggtgctccacctgccaatgcaaccatgcagcctccgagccttgatgcagatcctgctttgcaagggtcagtctatgatggcaagactctctttcatggtcctgcgttcagaggcattgatgacgttctcagctgcaccaagagccagcttgttgccaagtgttctgctgttcctggatcagatgcagccagaggagagtttgcaactgacactgatgcacatgatccctttgtcaatgatcttgcctttcaagcaatgttggtctgggtgaggagaacgctgggacaagctgcactcccgaactccattcagaggatagtccaacacagaccggtcccacaagacaaacccttctacatcaccctcagatccaatcagagtggtggacatagccagcacaaacatgcacttcagttccacaacgaacaaggtgatctcttcattgatgttcaagcctctgtcattgcgacagactcacttgcgttctgagtagttagcttaatcacttaggtcaccctatcaaaatctatttagaaatacacaatattttgttgcaggcttgctggagaatcgatctgctatcataaaaattacaaaaaaattttatttgcctcaattattttaggattggtattaaggacgcttaaattatttgtcgggtcactacgcatcattgtgattgagaagatcagcgatacgaaatattcgtagtactatcgataatttatttgaaaattcataagaaaagcaaacgttacatgaattgatgaaacaatacaaagacagataaagccacgcacatttaggatattggccgagattactgaatattgagtaagatcacggaatttctgacaggagcatgtcttcaattcagcccaaatggcagttgaaatactcaaaccgccccatatgcaggagcggatcattcattgtttgtttggttgcctttgccaacatgggagtccaaggttgcggccgcttaattaagatgagtgatactcaggactcaggactcactctgctgatcactagtgctagcctcgaggtcgacacaactttgtatacaaaagttgtctagacctaggctcagcaactcatccagtcaagttcgagtcagtgagttgggcggccgcgaattcggaaatgggccaagtgaaatggaaatagagcttcaatccatttagtcccactcaaaatggtgctcgaattatatttagttacgttcgaatcagacaaccaagtatttggttaataaaaaccactcgcaacaaaggaaaaacaccaagcgcgtgcgtccaacatccgacggaaggggggtaatgtggtccgaaaaccttacaaaaatctgacgtcatctacccccgaaaacgttgaatcgtcaacgggggtagttttcgaattatcttttttttaggggcagttttattaatttgctctagaaattttatgattttaattaaaaaaagaaaaagaatatttgtatatttattttttatactctttttttgtccaactatttctcttattttggcaactttaactagactagtaacttatgtcaatgtgtatggatgcatgagagtgagtatacacatgtctaaatgcatgccttatgaaagcaacgcaccacaaaacgaagacccctttacaaatacatctcatcccttagtaccctcttactactgtcccgacacaaactcaaaacaaggatccacaaccaaaaatggctgcaaggaacgtgagtgcggctcatgagatgcatgacgagaagaggatagctgttgtgggcatggctgttcagtatgctggatgcaaaacgaaagacgagttctgggaagttctcatgaatggaaaagttgagagcaaagtgatcagcgacaaacgtcttggttcaaattaccgtgctgaacactacaaagctgaaaggagcaagtatgctgacaccttctgcaatgagacatatggaactcttgatgagaacgaaatagacaatgagcatgaactccttttgaaccttgccaaacaagccttggctgaaacatctgtcaaagattcaacaagatgtggcatagtttctggatgcctcagcttcccgatggacaacctccaaggtgaactcttgaatgtgtaccagaaccatgttgagaagaaacttggtgccagagttttcaaagatgcctctcactggtcagaaagagaacagtccaacaaaccagaggctggtgacagaagaatcttcatggaccctgcttcctttgttgctgaggaactcaatcttggcgctctccactactctgttgatgctgcctgtgccactgcgctctatgtgctcagactggcgcaagatcacttggtctctggtgcagctgatgtgatgctttgtggtgcaacatgcctgccggagccgtttttcatactctctgggttctcaaccttccaagccatgcctgttggaacgggtcagaatgtgtccatgccgctgcacaaagattctcaaggattgacccctggtgaaggaggttccatcatggtcctcaaacgtttggatgacgcaatcagagatggagatcacatctatggaacacttttgggagccaatgtcagcaacagtggcactggtctgccacttaaaccccttttgccgtcagagaaaaagtgcctcatggacacctacacacgtatcaatgtgcatccccacaagattcagtatgttgaatgccatgcaactgggactccacaaggtgatcgtgtggaaattgatgctgtgaaggcttgctttgaaggcaaagtcccacgttttggaaccacaaaagggaactttggacacacattggtggcagctgggtttgctggcatgtgcaaagtgcttctctccatgaagcacgggatcattccacccactccgggaatagatgacgaaacgaagatggaccctctggttgtctctggtgaggccattccctggccagaaacgaatggagaaccgaagcgtgctggtctctcagcgtttggatttggtgggaccaatgctcatgctgtctttgaggaacatgacccaagcaatgctgcatgcactggccatgactccatttctgctctctctgcacgttgtggtggtgagtcaaacatgagaatagcaatcactgggatggatgccacttttggtgctttgaaaggattggatgcttttgaaagggccatctacactggtgctcatggtgctataccactcccagaaaagagatggagattcctggggaaagacaaggacttccttgatctttgtggagtcaaagcaacaccgcatggctgttacattgaagatgttgaagttgatttccagaggctgaggactccaatgactcctgaagatatgctcttgcctcaacagcttctggctgtcaccacaattgatagggccatattggactctggcatgaagaaaggtggaaatgtggctgtctttgtggggttggggaccgatcttgaactctaccgtcaccgtgcaagggttgctctcaaggagagagtgaggcctgaagccagcaagaaactcaatgacatgatgcagtacatcaatgattgtgggacaagcacttcttacaccagctacataggcaacttggttgcaacaagggtcagttcacaatggggcttcacgggaccttccttcacaatcacagaaggcaacaattctgtgtacagatgtgctgaacttggcaaatacctcttggaaacgggagaggttgatggggttgtggttgcgggtgttgatctctgtgggagtgctgagaacctttacgtcaagtcaaggcgtttcaaggtgtctacatctgacaccccgagagccagctttgatgcagctgctgatggttactttgttggagagggctgtggtgcatttgtgctcaagcgtgagacaagctgcaccaaggatgacagaatctatgcttgcatggatgccatagttcctggaaatgttccatctgcatgtttgagagaggcattggatcaagccagagtcaagcctggagacatcgagatgttggagctttctgctgattcagcgaggcatttgaaggacccgtctgttctcccaaaggaactcactgctgaggaagagattggcggacttcagacgattcttcgtgacgatgacaagctcccaaggaatgttgcaactggaagtgtcaaggccactgttggtgacactggttatgcttctggtgctgccagtttgattaaggctgcgctttgcatctacaaccgttacctgcccagcaatggagatgactgggatgaacctgcacctgaagcaccctgggacagcacactctttgcgtgccagacctcaagagcttggttgaagaaccctggtgagagacgttatgcggctgtttccggagtcagtgaaaccagaagttgctacagtgtgctgctttctgaagcagagggacactacgagagagagaacagaatcagtttggatgaggaagcacccaagctcattgtgttgagagcagactcccatgaagagattcttggaagattggacaagataagggaaaggttcttgcagcccacgggtgctgcacccagagagtctgaattgaaggcgcaagcccgtaggatctttcttgaactccttggtgagacccttgcccaagatgcagcttcatctggaagtcagaagccccttgctctcagcttggtctccactccatccaagctccagagagaggtggaacttgcggcaaaaggcattccgagatgtctcaagatgagacgtgattggagttcccctgctggaagcagatatgcgcctgagcctttggccagtgacagagttgccttcatgtatggagaaggaaggagcccttactatggcatcacacaagacattcataggatttggcctgaacttcatgaggtcatcaatgagaaaacaaaccgtctctgggctgaaggtgacagatgggtcatgccaagggccagcttcaagagtgagcttgagtcacaacagcaagagtttgacagaaacatgattgaaatgttccgtcttggaatcctcacctcaattgccttcacaaacctggcgagagatgttctcaacatcacgcccaaagcagcctttggactcagtttgggagagatttccatgatctttgctttctccaagaaaaacggtttgataagcgatcagttgacaaaggatttgagagagtcagatgtctggaacaaagctctggctgttgagttcaatgcgctcagagaagcctggggcattccacagtctgtcccaaaagatgagttctggcaaggttacatagtgaggggaacgaaacaagacatagaagcagccatagcaccagactcaaagtatgtgaggttgaccatcatcaatgatgccaacactgctctcatcagtggaaagcctgatgcatgcaaagctgcgattgctcgtcttggtggcaacatccctgcgcttccagtcactcaaggcatgtgtgggcattgcccagaggtgggaccttacaccaaggacatcgcaaagatccacgccaaccttgagttccctgtggttgatggtcttgatctctggactaccataaaccagaagaggcttgtgccaagagccacgggtgccaaagatgaatgggctccttcatcctttggggagtatgctggacagctctatgagaaacaagccaacttccctcagatagttgaaaccatctacaagcagaactatgatgtgtttgttgaagttgggccaaacaatcacagaagcacagcagtgagaaccacgcttggaccacagagaaaccaccttgctggtgccatagacaagcagaacgaggatgcttggacgacaatagtcaagctcgtggcttcattgaaggctcaccttgttcctggagtgaccatcagtccgctctaccactccaagctcgttgcagaggctgaggcttgttatgctgcgctctgtaaaggtgagaaacccaagaaaaacaagtttgtgagaaagattcagttgaatggcagattcaacagcaaggcagaccccatctcctcagcagaccttgcatccttcccacctgcggaccctgcgattgaagctgccatctcttcaaggatcatgaagcctgtggctccgaaattctatgcgcgtctcaacattgatgagcaagatgagaccagagatccgatcttgaacaaggacaatgcgccttccagctccagctcttccagcagttcctcttccagcagttcatctccgtctcctgctccttcagctccagttcagaagaaagctgccccagctgcggagacaaaagctgttgccagtgctgatgcacttcgtagtgccctgcttgatcttgactccatgcttgcgctcagctctgcaagtgcttctggcaaccttgttgagactgcgccatctgatgccagtgtcattgtccctccgtgcaacattgctgatcttggcagcagagctttcatgaaaacttatggtgtttctgcgcctctgtacaccggtgcaatggccaagggaattgcctctgcggacttggtgatcgcagctggaaggcaaggaatccttgcgtcatttggtgctggaggccttccaatgcaagttgtgcgtgagtccattgaaaagattcaagctgccctgcccaatggaccatatgctgtcaacctcatccattctccttttgacagcaaccttgagaagggaaatgttgatctcttcttggaaaagggtgtcacttttgttgaggcttcagccttcatgacgttgacaccgcaagttgtcagatacagagcggctgggttgacgaggaatgcagatgggtcagtcaacataaggaacagaatcattgggaaagtctccagaactgagctggctgaaatgttcatgcgtcctgcacctgagcatcttttgcagaagctcattgcttctggggagatcaatcaagaacaagctgagttggccagacgtgttcctgtggctgatgacattgcggttgaagctgattctggtggacacactgacaaccgtccaatccatgtcattctgcctctgattatcaacctgagggataggcttcacagagagtgtggatacccagcaaacctgagggttcgtgttggtgctgggggtggcattgggtgtccccaagctgcgctggcaactttcaacatgggtgcctctttcattgtcactggaacagtgaaccaagttgccaaacaatctgggacgtgtgacaatgtgaggaaacagcttgcgaaagcaacttactcagatgtttgcatggcaccggcagctgacatgtttgaggaaggtgtgaaacttcaagttttgaagaaaggaacaatgttcccttcaagagccaacaaactctatgagttgttctgcaagtatgattcttttgagtccatgcctccagcagagcttgcgagggttgagaaaagaatcttcagtcgtgcattggaagaggtctgggatgagaccaagaacttctacatcaaccgtctccacaacccagagaagatacagagggctgagagggaccccaaactgaagatgtcactgtgtttcagatggtatctgtccctggcttcaaggtgggccaacactggagcttctgacagagtcatggactaccaagtttggtgtggtcctgccattggttcattcaatgatttcatcaaaggaacttaccttgatccggcagtggcaaatgagtacccgtgtgttgtgcagatcaacaaacagattcttagaggagcgtgcttcttgaggcgtcttgaaatactgagaaatgcaaggctttcagatggtgcagctgcacttgtggcgagcattgatgacacatatgtccctgctgagaagctgtgagtagttagcttaatcacttaggtcaccctatcaaaatctatttagaaatacacaatattttgttgcaggcttgctggagaatcgatctgctatcataaaaattacaaaaaaattttatttgcctcaattattttaggattggtattaaggacgcttaaattatttgtcgggtcactacgcatcattgtgattgagaagatcagcgatacgaaatattcgtagtactatcgataatttatttgaaaattcataagaaaagcaaacgttacatgaattgatgaaacaatacaaagacagataaagccacgcacatttaggatattggccgagattactgaatattgagtaagatcacggaatttctgacaggagcatgtcttcaattcagcccaaatggcagttgaaatactcaaaccgccccatatgcaggagcggatcattcattgtttgtttggttgcctttgccaacatgggagtccaaggttgcggccgcttaattaatctgacctgaccactagacctgagtgagtacagatgtgctactagtgctagcctcgaggtcgaccaacttttctatacaaagttgtctagacctaggactaggcactgagtgactcactgacctgactgagtgactggcggccgcgcggccgcgaattcggaaatgggccaagtgaaatggaaatagagcttcaatccatttagtcccactcaaaatggtgctcgaattatatttagttacgttcgaatcagacaaccaagtatttggttaataaaaaccactcgcaacaaaggaaaaacaccaagcgcgtgcgtccaacatccgacggaaggggggtaatgtggtccgaaaaccttacaaaaatctgacgtcatctacccccgaaaacgttgaatcgtcaacgggggtagttttcgaattatcttttttttaggggcagttttattaatttgctctagaaattttatgattttaattaaaaaaagaaaaagaatatttgtatatttattttttatactctttttttgtccaactatttctcttattttggcaactttaactagactagtaacttatgtcaatgtgtatggatgcatgagagtgagtatacacatgtctaaatgcatgccttatgaaagcaacgcaccacaaaacgaagacccctttacaaatacatctcatcccttagtaccctcttactactgtcccgacacaaactcaaaacaaggatccacaaccaaaaatggcgcttcgtgtcaagaccaacaagaagccatgttgggagatgaccaaggaggaactgacctctggcaaaactgaggtgttcaactatgaggaactcctggagtttgcagagggtgacatagctaaggtttttggtccggagtttgctgtcatagacaagtaccccagaagggtgaggctgcctgctcgtgaatacctgcttgtgacaagggtcacactcatggatgccgaggtcaacaactacagagttggtgccagaatggtcactgagtatgatcttccagtgaatggcgaattgtctgagggaggtgattgtccctgggcagttctggttgagagtggacagtgcgatttgatgctgatatcatacatgggaattgatttccagaaccaaggtgacagagtttaccgtctgctcaacaccacgttgacattctatggggttgcccatgagggagagacccttgagtatgacatcagagtgaccggttttgccaaacgtttggatggtggcatctccatgttcttctttgagtatgactgctatgtcaatgggaggcttctcattgagatgagagatggctgtgctggcttcttcacaaatgaggagcttgatgcgggaaagggtgtggtgttcacaagaggggatttggctgccagagctaagattccaaagcaagatgtttctccctatgctgtcgctccctgccttcacaaaacaaaactcaacgaaaaggagatgcagaccttggttgacaaagattgggcttccgtttttggctcaaagaatggcatgccggagatcaactacaaactctgcgcacgtaagatgctcatgattgatagagtcaccagcattgaccataagggaggtgtgtacggtttgggtcagttggttggtgagaaaatcttggagagggaccattggtacttcccatgccattttgttaaggatcaagtcatggctggatctcttgtcagcgacggttgttcacaaatgctcaagatgtacatgatctggctcggtttgcaccttaccaccggaccatttgacttcagacccgtcaacggacacccgaacaaagttaggtgtaggggtcagatatctcctcataagggaaagttggtctacgtcatggagatcaaagagatgggattcgacgaggataacgatccgtacgccattgctgacgtcaacatcattgacgttgatttcgaaaagggtcaagatttcagccttgatagaatcagcgactacggaaagggggatcttaacaaaaagatcgtcgtggacttcaagggcattgctctcaagatgcagaagagatccacgaacaagaacccctccaaagttcagcccgtttttgctaacggtgcagccactgtgggaccggaagcgtccaaggccagctctggtgccagtgctagtgcttctgctgcccctgcgaagcctgctttctcagcagatgttcttgcgccaaagccagttgcacttcctgaacatatcctcaagggtgacgctctcgctccgaaagaaatgtcctggcatcccatgtcaaaacttcctggcaacccgacgccgttcttctcccctagttcttaccctccgagggcaatttgcttcatccctttccctggcaacccacttgacaacaattgcaaagctggagaaatgcctctgaactggtacaacatgtcagagttcatgtgtggaaaagttagcaactgcttgggaccagagttcgcaagatttgataagtcaaatacgagcagaagccctgcttttgatttggctcttgtgactagagttgttgaagtcacaaacatggaacatggcaagttcctgaatgttgattgcaatcccagcaaaggcacaatggtgggggagtttgactgtcctcaagatgcgtggttctttgatggttcttgcaatgatgggcacatgccttattccatcatcatggaaatcggacttcagacatccggtgttctcaccagtgtgttgaaagcaccactgacgatggacaaagatgacattctctttaggaaccttgatgcaagtgctgaaatggtgaggccagatgtggatgtgagggggaaaaccataaggaatgtgaccaagtgcactggatatgcaatgttgggaaagatggggattcacagattcacgtttgagttgtctgttgatggcgtggttttctacaaaggaagcacttcctttggatggttcactccagaggtgtttgctcagcaagctggacttgacaatgggaaaaagacggagccttggtgcaaaactaacaacacgagtgtgagaagagttgaaatcgcatcagccaaaggcaaagaacagctgactgagaaacttccagatgcaactaatgctcaagttctcagaaggtcagaacagtgtgagtatttggattacctcaacattgctcctgattctgggctgcatgggaaaggatatgcgcatggacacaaagatgttaacccacaagactggttcttctcttgtcacttttggtttgatcctgtgatgcctggatctttgggaattgagtcaatgttccagctcattgaggcatttgcggtggaccagaacataccgggagaatacaatgtgagcaatccgacctttgcccatgcccctggaaaaacggcgtggaagtaccgtggtcaattgacaccaaagaaccgtgcgatggactgtgaggtgcacatagtttcaatcacagcctctcctgaaaatggaggctacgttgacatagtggcagatggagcactttgggttgatggtctccgtgtgtatgaagccaaagaactcagagttcgtgttgtcagtgcaaaacctcaagccattccggatgttcaacaacagccacccagcgcaaaagcggaccctgggaaaactggagttgcactcagtccgactcagttgagagatgtcctgcttgaagtggacaatccattgtatcttggtgttgaaaactccaatttggtgcagtttgaatccaaacctgcaacttcttcaaggattgtcagtatcaaaccatgctccataagtgatcttggtgacaagtccttcatggaaacgtacaatgtgtcagcacctctgtacactggagcaatggccaagggaattgcgtctgcggaccttgtcattgctgctgggaagaggaagatattgggttcttttggagcgggtgggcttccaatgcaccatgtgagggcagctttggagaagatacaagcggctctgcctcaaggaccatatgctgtgaacctcattcattcaccttttgacagcaacttggaaaaggggaatgttgatctcttcctcgaaaagggcgttactgtggtggaggcttctgcattcatgaccctcactccccaagttgttcgttaccgtgcagccggactctcaaggaacgctgatgggagtgtcaacatcagaaaccgtatcattggaaaagtgtccagaacagaactcgccgaaatgttcatcagaccggctccggaacacctccttgagaaactcatagcttctggtgagataacacaagaacaagccgaacttgcccgtcgtgttcctgtcgcagacgacatcgctgttgaagctgattctggtggtcacactgacaaccgtcccatccacgtcatcttgcctttgatcatcaaccttaggaacagactgcacagagagtgtggttatcctgcgcaccttagagtcagagttggagctggaggcggtgttggctgcccacaagctgctgcggctgccctcacaatgggagctgccttcatagtgactgggactgtcaatcaagttgctaaacagtccgggacatgtgacaacgtgagaaaacaactcagtcaagccacctacagtgacatttgcatggctccagcagctgatatgtttgaggaaggtgtgaaactccaagttctcaagaagggaacaatgttcccatcaagagctaacaaattgtacgaactcttttgcaagtacgactctttcgattcaatgcctcctgctgaacttgaaaggatcgagaagaggatcttcaagagggcacttcaagaggtctgggaagagaccaaggacttttacatcaatggtttgaagaatccagagaagatacagagagcggaacatgaccccaaactcaagatgtctttgtgtttcagatggtatcttggtcttgcatcacgttgggccaacatgggtgctcctgatcgtgtcatggactatcaagtctggtgtggtccagccattggagccttcaatgacttcatcaaaggaacatatcttgatcctgctgtctctaatgagtacccatgtgttgtccagatcaaccttcagattttgcgtggtgcatgttacctgaggcgtcttaatgctctgagaaatgatccgaggattgatcttgagactgaagatgctgcctttgtctatgagccaacgaatgcgctttgagtagttagcttaatcacttaggtcaccctatcaaaatctatttagaaatacacaatattttgttgcaggcttgctggagaatcgatctgctatcataaaaattacaaaaaaattttatttgcctcaattattttaggattggtattaaggacgcttaaattatttgtcgggtcactacgcatcattgtgattgagaagatcagcgatacgaaatattcgtagtactatcgataatttatttgaaaattcataagaaaagcaaacgttacatgaattgatgaaacaatacaaagacagataaagccacgcacatttaggatattggccgagattactgaatattgagtaagatcacggaatttctgacaggagcatgtcttcaattcagcccaaatggcagttgaaatactcaaaccgccccatatgcaggagcggatcattcattgtttgtttggttgcctttgccaacatgggagtccaaggttgcggccgcttaattaatcacgagtggatgactgtcacgactgactcatgactgactactagtgctagcctcgaggtcgacacaactttgtataataaagttgtctagacctaggagctgtgctgggtaactcacatgagtcactggtcacatcagcggccgcgaattcggaaatgggccaagtgaaatggaaatagagcttcaatccatttagtcccactcaaaatggtgctcgaattatatttagttacgttcgaatcagacaaccaagtatttggttaataaaaaccactcgcaacaaaggaaaaacaccaagcgcgtgcgtccaacatccgacggaaggggggtaatgtggtccgaaaaccttacaaaaatctgacgtcatctacccccgaaaacgttgaatcgtcaacgggggtagttttcgaattatcttttttttaggggcagttttattaatttgctctagaaattttatgattttaattaaaaaaagaaaaagaatatttgtatatttattttttatactctttttttgtccaactatttctcttattttggcaactttaactagactagtaacttatgtcaatgtgtatggatgcatgagagtgagtatacacatgtctaaatgcatgccttatgaaagcaacgcaccacaaaacgaagacccctttacaaatacatctcatcccttagtaccctcttactactgtcccgacacaaactcaaaacaaggatccacaaccaaaaatgcttcagcacacttggcttccgaagcctcccaatctgaccctcttgtcagatgaggttcatctctggaggattcctcttgaccagcctgagtcacaacttcaagaccttgctgccaccctgagcagtgatgaattggcgagggcaaacagattctactttccagaacacagaaggcgtttcactgctgggagaggcatcctcagatccatcttgggtggatacttgggagtggaaccgggtcaagtcaagtttgattatgagtcccgtgggaaaccgatccttggtgacagatttgctgagagtggactcctgttcaacttgtctcacagccagaaccttgccttgtgtgctgtcaactacacgcgtcaaataggcattgatcttgaatatctgcgtccaacatctgacttggagtctcttgcaaagaggttctttctcccaagagaatatgaactcttgaggtcactccctgatgagcagaaacagaagattttctttcgttactggacttgcaaagaggcttatctcaaagcaacgggagatggaatagccaaacttgaagagatcgagatagcactcaccccaacagaacctgccaagctccaaacagctcctgcgtggtctctgttggagcttgtgccagatgacaattgtgttgcagctgtggctgttgcgggttttggttggcagcccaagttctggcattactgagtagttagcttaatcacttaggtcaccctatcaaaatctatttagaaatacacaatattttgttgcaggcttgctggagaatcgatctgctatcataaaaattacaaaaaaattttatttgcctcaattattttaggattggtattaaggacgcttaaattatttgtcgggtcactacgcatcattgtgattgagaagatcagcgatacgaaatattcgtagtactatcgataatttatttgaaaattcataagaaaagcaaacgttacatgaattgatgaaacaatacaaagacagataaagccacgcacatttaggatattggccgagattactgaatattgagtaagatcacggaatttctgacaggagcatgtcttcaattcagcccaaatggcagttgaaatactcaaaccgccccatatgcaggagcggatcattcattgtttgtttggttgcctttgccaacatgggagtccaaggttgcggccgcttaattaactactgtcactgaggccgtagacgagtacggactgatctaactagtgctagcctcgaggtcgacacccagctttcttgtacaaagtggttgcggccgcttaattaaatttaaattcaattaatgcaatcttgattttcaacaacgaaggtaatggcgtaaaagaaaaaatgtatgttattgtattgatctttcatgatgttgaagcgtgccataatatgatgatgtataattaaaatattaactgtcgcattttattgaaatggcactgttatttcaaccatatctttgattctgttacatgacacgactgcaagaagtaaataatagacgccgttgttaaagaattgctatcatatgtgcctaactagagggaatttgagcgtcagacctaatcaaatattacaaaatatctcactctgtcgccagcaatggtgtaatcagcgcagacaaatggcgtaaagatcgcggaaaaacctccccgagtggcatgatagctgcctctgtattgctgatttagtcagccttatttgacttaagggtgccctcgttagtgacaaattgctttcaaggagacagccatgccccacactttgttgaaaaacaaattgcctttggggagacggtaaagccagttgctcttcaataaggaatgtcgaggaggcaatgtaaccgcctctggtagtacacttctctaatccaaaaatcaatttgtattcaagataccgcaaaaaacttatggtttaaaccctgcaggactagtccagaaggtaattatccaagatgtagcatcaagaatccaatgtttacgggaaaaactatggaagtattatgtaagctcagcaagaagcagatcaatatgcggcacatatgcaacctatgttcaaaaatgaagaatgtacagatacaagatcctatactgccagaatacgaagaagaatacgtagaaattgaaaaagaagaaccaggcgaagaaaagaatcttgaagacgtaagcactgacgacaacaatgaaaagaagaagataaggtcggtgattgtgaaagagacatagaggacacatgtaaggtggaaaatgtaagggcggaaagtaaccttatcacaaaggaatcttatcccccactacttatccttttatatttttccgtgtcatttttgcccttgagttttcctatataaggaaccaagttcggcatttgtgaaaacaagaaaaaatttggtgtaagctattttctttgaagtactgaggatacaacttcagagaaatttgtaagtttgtaggtaccagatctggatcccaaaccatgtctccggagaggagaccagttgagattaggccagctacagcagctgatatggccgcggtttgtgatatcgttaaccattacattgagacgtctacagtgaactttaggacagagccacaaacaccacaagagtggattgatgatctagagaggttgcaagatagatacccttggttggttgctgaggttgagggtgttgtggctggtattgcttacgctgggccctggaaggctaggaacgcttacgattggacagttgagagtactgtttacgtgtcacataggcatcaaaggttgggcctaggatctacattgtacacacatttgcttaagtctatggaggcgcaaggttttaagtctgtggttgctgttataggccttccaaacgatccatctgttaggttgcatgaggctttgggatacacagcccggggtacattgcgcgcagctggatacaagcatggtggatggcatgatgttggtttttggcaaagggattttgagttgccagctcctccaaggccagttaggccagttacccaaatctgagtagttagcttaatcacctagagctcgatcggcggcaatagcttcttagcgccatcccgggttgatcctatctgtgttgaaatagttgcggtgggcaaggctctctttcagaaagacaggcggccaaaggaacccaaggtgaggtgggctatggctctcagttccttgtggaagcgcttggtctaaggtgcagaggtgttagcgggatgaagcaaaagtgtccgattgtaacaagatatgttgatcctacgtaaggatattaaagtatgtattcatcactaatataatcagtgtattccaatatgtactacgatttccaatgtctttattgtcgccgtatgtaatcggcgtcacaaaataatccccggtgactttcttttaatccaggatgaaataatatgttattataatttttgcgatttggtccgttataggaattgaagtgtgcttgaggtcggtcgccaccactcccatttcataattttacatgtatttgaaaaataaaaatttatggtattcaatttaaacacgtatacttgtaaagaatgatatcttgaaagaaatatagtttaaatatttattgataaaataacaagtcaggtattatagtccaagcaaaaacataaatttattgatgcaagtttaaattcagaaatatttcaataactgattatatcagctggtacattgccgtagatgaaagactgagtgcgatattatggtgtaatacataggaattcgtttaaacgatctgcgtctaattttcggtccaacttgcacaggaaagacgtcgaccgcggtagctcttgcccagcagactgggcttccagtcctttcgctcgatcgggtccaatgttgtcctcagctgtgaaccggaagcggacgaccaacagtggaagaactgaaaggaacgagccgtctataccttgatgatcggcctctggtgaagggtatcatcgcagccaagcaagctcatgaaaggctgatgggggaggtgtataattatgaggcccacggcgggcttattctttagggaggatctatctcgttgctcaagtgcatggcgcaaagcagttattggagtgcggattttcgttggcatattattcgccacgagttagcagacgaagagaccttcatgaacgtggccaaggccagagttaagcagatgttacgccctgctgcaggcctttctattatccaatagttggttgatctttggaaagagcctcggctgaggcccatactgaaagagatcgatggatatcgatatgccatgttgtttgctagccagaaccagatcacatccgatatgctattgcagcttgacgcagatatggaggataagttgattcatgggatcgctcaggagtagctcatccatgcacgccgacaagaacagaaattccgtcgagttaacgcagccgcttacgacggattcgaaggtcatccattcggaatgtattagtttgcaccagctccgcgtcacacctgtcttcatttgaataagatgttagcaattgtttttagctttgtcttgttgtggcagggcggcaagtgcttcagacatcattctgttttcaaattttatgctggagaacagcttcttaattcctttggaaataatagactgcgtcttaaaattcagatgtctggatatagatatgattgtaaaataacctatttaagtgtcatttagaacataagttttatgaatgttcttccattttcgtcatcgaacgaataagagtaaatacaccttttttaacattacaaataagttcttatacgttgtttatacaccgggaatcatttccattattttcgcgcaaaagtcacggatattcgtgaaagcgacataaactgcgaaatttgcggggagtgtcttgagtttgcctcgaggctagcgcatgcacatagacacacacatcatctcattgatgcttggtaataattgtcattagattgtttttatgcatagatgcactcgaaatcagccaattttagacaagtatcaaacggatgtgacttcagtacattaaaaacgtccgcaatgtgttattaagttgtctaagcgtcaatttgatttacaattgaatatatcctgccccagccagccaacagctcgatttacaattgaatatatcctgccggccggcccacgcgtgtcgaggaattctgatctggcccccatttggacgtgaatgtagacacgtcgaaataaagatttccgaattagaataatttgtttattgctttcgcctataaatacgacggatcgtaatttgtcgttttatcaaaatgtactttcattttataataacgctgcggacatctacatttttgaattgaaaaaaaattggtaattactctttctttttctccatattgaccatcatactcattgctgatccatgtagatttcccggacatgaagccatttacaattgaatatatcctgccgccgctgccgctttgcacccggtggagcttgcatgttggtttctacgcagaactgagccggttaggcagataatttccattgagaactgagccatgtgcaccttccccccaacacggtgagcgacggggcaacggagtgatccacatgggacttttaaacatcatccgtcggatggcgttgcgagagaagcagtcgatccgtgagatcagccgacgcaccgggcaggcgcgcaacacgatcgcaaagtatttgaacgcaggtacaatcgagccgacgttcacgcggaacgaccaagcaagcttggctgccatttttggggtgaggccgttcgcggccgaggggcgcagcccctggggggatgggaggcccgcgttagcgggccgggagggttcgagaagggggggcaccccccttcggcgtgcgcggtcacgcgcacagggcgcagccctggttaaaaacaaggtttataaatattggtttaaaagcaggttaaaagacaggttagcggtggccgaaaaacgggcggaaacccttgcaaatgctggattttctgcctgtggacagcccctcaaatgtcaataggtgcgcccctcatctgtcagcactctgcccctcaagtgtcaaggatcgcgcccctcatctgtcagtagtcgcgcccctcaagtgtcaataccgcagggcacttatccccaggcttgtccacatcatctgtgggaaactcgcgtaaaatcaggcgttttcgccgatttgcgaggctggccagctccacgtcgccggccgaaatcgagcctgcccctcatctgtcaacgccgcgccgggtgagtcggcccctcaagtgtcaacgtccgcccctcatctgtcagtgagggccaagttttccgcgaggtatccacaacgccggcggccgcggtgtctcgcacacggcttcgacggcgtttctggcgcgtttgcagggccatagacggccgccagcccagcggcgagggcaaccagcccggtgagcgtcggaaagggtcgacggatcttttccgctgcataaccctgcttcggggtcattatagcgattttttcggtatatccatcctttttcgcacgatatacaggattttgccaaagggttcgtgtagactttccttggtgtatccaacggcgtcagccgggcaggataggtgaagtaggcccacccgcgagcgggtgttccttcttcactgtcccttattcgcacctggcggtgctcaacgggaatcctgctctgcgaggctggccggctaccgccggcgtaacagatgagggcaagcggatggctgatgaaaccaagccaaccaggaagggcagcccacctatcaaggtgtactgccttccagacgaacgaagagcgattgaggaaaaggcggcggcggccggcatgagcctgtcggcctacctgctggccgtcggccagggctacaaaatcacgggcgtcgtggactatgagcacgtccgcgagctggcccgcatcaatggcgacctgggccgcctgggcggcctgctgaaactctggctcaccgacgacccgcgcacggcgcggttcggtgatgccacgatcctcgccctgctggcgaagatcgaagagaagcaggacgagcttggcaaggtcatgatgggcgtggtccgcccgagggcagagccatgacttttttagccgctaaaacggccggggggtgcgcgtgattgccaagcacgtccccatgcgctccatcaagaagagcgacttcgcggagctggtattcgtgcagggcaagattcggaataccaagtacgagaaggacggccagacggtctacgggaccgacttcattgccgataaggtggattatctggacaccaaggcaccaggcgggtcaaatcaggaataagggcacattgccccggcgtgagtcggggcaatcccgcaaggagggtgaatgaatcggacgtttgaccggaaggcatacaggcaagaactgatcgacgcggggttttccgccgaggatgccgaaaccatcgcaagccgcaccgtcatgcgtgcgccccgcgaaaccttccagtccgtcggctcgatggtccagcaagctacggccaagatcgagcgcgacagcgtgcaactggctccccctgccctgcccgcgccatcggccgccgtggagcgttcgcgtcgtctcgaacaggaggcggcaggtttggcgaagtcgatgaccatcgacacgcgaggaactatgacgaccaagaagcgaaaaaccgccggcgaggacctggcaaaacaggtcagcgaggccaagcaggccgcgttgctgaaacacacgaagcagcagatcaaggaaatgcagctttccttgttcgatattgcgccgtggccggacacgatgcgagcgatgccaaacgacacggcccgctctgccctgttcaccacgcgcaacaagaaaatcccgcgcgaggcgctgcaaaacaaggtcattttccacgtcaacaaggacgtgaagatcacctacaccggcgtcgagctgcgggccgacgatgacgaactggtgtggcagcaggtgttggagtacgcgaagcgcacccctatcggcgagccgatcaccttcacgttctacgagctttgccaggacctgggctggtcgatcaatggccggtattacacgaaggccgaggaatgcctgtcgcgcctacaggcgacggcgatgggcttcacgtccgaccgcgttgggcacctggaatcggtgtcgctgctgcaccgcttccgcgtcctggaccgtggcaagaaaacgtcccgttgccaggtcctgatcgacgaggaaatcgtcgtgctgtttgctggcgaccactacacgaaattcatatgggagaagtaccgcaagctgtcgccgacggcccgacggatgttcgactatttcagctcgcaccgggagccgtacccgctcaagctggaaaccttccgcctcatgtgcggatcggattccacccgcgtgaagaagtggcgcgagcaggtcggcgaagcctgcgaagagttgcgaggcagcggcctggtggaacacgcctgggtcaatgatgacctggtgcattgcaaacgctagggccttgtggggtcagttccggctgggggttcagcagccagcgctttactggcatttcaggaacaagcgggcactgctcgacgcacttgcttcgctcagtatcgctcgggacgcacggcgcgctctacgaactgccgataaacagaggattaaaattgacaattgtgattaaggctcagattcgacggcttggagcggccgacgtgcaggatttccgcgagatccgattgtcggccctgaagaaagctccagagatgttcgggtccgtttacgagcacgaggagaaaaagcccatggaggcgttcgctgaacggttgcgagatgccgtggcattcggcgcctacatcgacggcgagatcattgggctgtcggtcttcaaacaggaggacggccccaaggacgctcacaaggcgcatctgtccggcgttttcgtggagcccgaacagcgaggccgaggggtcgccggtatgctgctgcgggcgttgccggcgggtttattgctcgtgatgatcgtccgacagattccaacgggaatctggtggatgcgcatcttcatcctcggcgcacttaatatttcgctattctggagcttgttgtttatttcggtctaccgcctgccgggcggggtcgcggcgacggtaggcgctgtgcagccgctgatggtcgtgttcatctctgccgctctgctaggtagcccgatacgattgatggcggtcctgggggctatttgcggaactgcgggcgtggcgctgttggtgttgacaccaaacgcagcgctagatcctgtcggcgtcgcagcgggcctggcgggggcggtttccatggcgttcggaaccgtgctgacccgcaagtggcaacctcccgtgcctctgctcacctttaccgcctggcaactggcggccggaggacttctgctcgttccagtagctttagtgtttgatccgccaatcccgatgcctacaggaaccaatgttctcggcctggcgtggctcggcctgatcggagcgggtttaacctacttcctttggttccgggggatctcgcgactcgaacctacagttgtttccttactgggctttctcagcccccgagcgcttagtgggaatttgtaccccttatcgaaccgggagcacaggatgacgcctaacaattcattcaagccgacaccgcttcgcggcgcggcttaattcaggagttaaacatcatgagggaagcggtgatcgccgaagtatcgactcaactatcagaggtagttggcgtcatcgagcgccatctcgaaccgacgttgctggccgtacatttgtacggctccgcagtggatggcggcctgaagccacacagtgatattgatttgctggttacggtgaccgtaaggcttgatgaaacaacgcggcgagctttgatcaacgaccttttggaaacttcggcttcccctggagagagcgagattctccgcgctgtagaagtcaccattgttgtgcacgacgacatcattccgtggcgttatccagctaagcgcgaactgcaatttggagaatggcagcgcaatgacattcttgcaggtatcttcgagccagccacgatcgacattgatctggctatcttgctgacaaaagcaagagaacatagcgttgccttggtaggtccagcggcggaggaactctttgatccggttcctgaacaggatctatttgaggcgctaaatgaaaccttaacgctatggaactcgccgcccgactgggctggcgatgagcgaaatgtagtgcttacgttgtcccgcatttggtacagcgcagtaaccggcaaaatcgcgccgaaggatgtcgctgccgactgggcaatggagcgcctgccggcccagtatcagcccgtcatacttgaagctaggcaggcttatcttggacaagaagatcgcttggcctcgcgcgcagatcagttggaagaatttgttcactacgtgaaaggcgagatcaccaaggtagtcggcaaataatgtctaacaattcgttcaagccgacgccgcttcgcggcgcggcttaactcaagcgttagagagctggggaagactatgcgcgatctgttgaaggtggttctaagcctcgtcttgcgatggcatttcgatccattcccattccgcgctcaagatggcttcccctcggcagttcatcagggctaaatcaatctagccgacttgtccggtgaaatgggctgcactccaacagaaacaatcaaacaaacatacacagcgacttattcacacgagctca

SEQ ID NO: 47 - DNA, 34404 bp, Artificial sequence
  plasmid pDAB9167
aattacaacggtatatatcctgccagtcagcatcatcacaccaaaagttaggcccgaatagtttgaaattagaaagctcgcaattgaggtctacaggccaaattcgctcttagccgtacaatattactcaccggatcctaaccggtttaattaaggcgcgccatgcccgggcaagcggccgcacaagtttgtacaaaaaagcaggcttctagacctaggtggagtcatcacgcagactatctcagcatgtgcgtagcacgcggccgcgaattcggaaatgggccaagtgaaatggaaatagagcttcaatccatttagtcccactcaaaatggtgctcgaattatatttagttacgttcgaatcagacaaccaagtatttggttaataaaaaccactcgcaacaaaggaaaaacaccaagcgcgtgcgtccaacatccgacggaaggggggtaatgtggtccgaaaaccttacaaaaatctgacgtcatctacccccgaaaacgttgaatcgtcaacgggggtagttttcgaattatcttttttttaggggcagttttattaatttgctctagaaattttatgattttaattaaaaaaagaaaaagaatatttgtatatttattttttatactctttttttgtccaactatttctcttattttggcaactttaactagactagtaacttatgtcaatgtgtatggatgcatgagagtgagtatacacatgtctaaatgcatgccttatgaaagcaacgcaccacaaaacgaagacccctttacaaatacatctcatcccttagtaccctcttactactgtcccgacacaaactcaaaacaaggatccacaaccaaaaatggcagcgaggctgcaagagcagaaaggaggtgagatggacacgaggattgcgatcataggcatgagcgccatacttccttgtggaaccacggtgagagagtcatgggagaccataagggctggcattgattgcctgtctgatcttcctgaggatcgtgttgatgtgactgcgtactttgacccagtcaagaccacaaaggacaaaatctactgcaagagaggaggtttcattcctgagtatgactttgatgcgcgtgagtttggtctcaacatgttccagatggaagattctgatgcgaatcagaccatctcacttctcaaggtcaaagaagcacttcaagatgctgggattgatgcacttggaaaggagaagaaaaacataggatgcgtgcttggcattggaggtggacagaagagttcacatgagttctacagcagactcaactatgtggttgtggagaaagtcttgagaaagatggggatgccagaggaagatgtcaaagtggctgtggagaagtacaaagcgaacttcccagaatggagacttgactctttccctggattccttgggaatgtcactgctggcagatgcaccaacacattcaacttggatggcatgaactgcgttgtggatgctgcatgtgcaagctccttgatagcagtcaaggttgcgattgatgaactgctctatggtgactgcgacatgatggtcactggtgcaacctgcacagacaactccattgggatgtacatggctttctcaaagacacctgtgttcagcacggacccaagtgtgagagcgtatgatgagaaaacgaaagggatgctcattggtgagggatcagccatgttggtgctcaaacgttatgcagatgcagtgagggatggtgatgagattcatgctgtgattcgtggttgtgcaagctcaagtgatggcaaagcagctggcatctacactcccacaatcagtggtcaagaggaagccttgagacgtgcatacaatcgtgcctgcgttgaccctgccactgtcactttggttgagggtcatgggactggcactccagttggagataggattgagttgactgcgttgaggaacttgtttgacaaagcgtatggtgaagggaacacagagaaagttgcagttggaagtatcaagtccagtattggtcatttgaaggctgttgctggtcttgctggaatgatcaaggtcatcatggctctcaaacacaagactttgcctggaacgatcaatgtggacaatccacccaatctctatgacaacactcccatcaatgagtcatccctctacatcaacacgatgaacagaccctggttccctccacctggtgttccgagacgtgctggaatatccagctttggctttggaggtgccaactaccatgcagtgttggaagaggctgaaccagagcacacgacagcgtacagactcaacaaacgtccacaaccggtgttgatgatggctgcaactcctgctgcgttgcagagcctttgtgaagctcagctgaaagagtttgaagctgcgatcaaggagaatgagacagtcaagaatactgcctacatcaagtgtgtcaagtttggagaacagttcaagttccctgggagcatacctgcgaccaatgcgagactgggattcttggtcaaagatgcggaggatgcgtgctccacgcttcgtgctatatgtgctcagtttgccaaagatgtgaccaaagaagcgtggaggcttccgagagaaggagtttctttccgtgccaaaggcattgccaccaatggtgctgttgctgcactcttctctggacaaggtgctcagtacacacacatgttcagtgaagttgcgatgaactggcctcagttcagacagtccattgctgcaatggacgctgcacagtccaaggttgctggaagtgacaaagactttgaaagagtctctcaagtcctgtacccaaggaaaccgtacgaacgtgagccagaacaagatcacaagaaaatctcactcacagcatacagccagccgtcaaccctggcatgtgctcttggtgcctttgagattttcaaggaagctggattcactccagactttgcagctggacacagcttgggtgagtttgctgcgctctatgcagctggttgtgttgacagagatgagttgtttgaacttgtttgcagaagggcaaggatcatgggaggcaaagatgcacctgccacacccaaaggttgcatggcagctgtcataggacccaacgcagagaacatcaaggttcaagctgccaacgtctggcttggaaactcaaactctccgtctcagactgtcattactgggtctgttgaagggattcaagctgaaagtgccagattgcagaaggaagggttcagagttgtgcctcttgcttgtgagtctgccttccattctccacagatggaaaatgccagctcagctttcaaagatgtcatatccaaggtttccttccgtacacccaaagcagaaacaaagctcttcagcaatgtttctggagagacctatccgacggatgccagagagatgctcactcaacacatgacctcatctgtgaagttcctgacccaagtgaggaacatgcaccaagctggtgcgagaatctttgttgagtttggaccgaaacaagttctcagcaaacttgtttctgaaaccctcaaagatgacccgtctgttgtcacagtgtctgtgaacccagcttctggcacggactctgacatacagttgagggatgctgcagttcagctggttgtggctggtgtcaatcttcaagggtttgacaagtgggatgctcctgatgccacgaggatgcaagccatcaagaaaaagagaaccacactcagactttcagctgccacctatgtcagtgacaagaccaagaaagtgagggatgctgccatgaacgacggaagatgtgtcacatacctcaagggtgctgcaccactcatcaaggctcctgaacctgtggttgacgaagctgccaagagggaggctgaaaggcttcagaaggagcttcaagacgctcagaggcagcttgacgacgccaaacgtgcagctgcagaagccaactccaaacttgctgctgccaaggaggaagccaagactgctgcagcttcagccaagcctgcagttgacactgctgttgtggagaaacatcgtgccatcctcaagtccatgctggctgagctggatggttatggaagtgttgatgcttcttcccttcagcaacagcaacagcaacagactgctccggcgcctgttaaagccgctgcccctgccgctcccgttgcaagtgctcctgctcccgccgtgtccaacgagttgcttgagaaagctgagacagttgtgatggaggttctcgctgccaagactggatacgaaacagacatgattgaggcggacatggagcttgagactgagttgggaattgacagcatcaagagggttgaaattctttctgaagtccaagctatgcttaacgttgaggcgaaagatgttgatgctctctctaggacgagaacagtgggtgaagttgtcaacgctatgaaggcagaaatcgctggttcttccgctccggcgccggcagctgccgcacctgcaccggctaaagcggctccagctgcagctgcaccagctgtttctaatgagctgctcgaaaaggcagaaactgttgtgatggaagtccttgctgccaaaactggctacgaaactgacatgatagaatcagacatggagcttgagacggagcttggaattgattccatcaagcgtgtggaaatcctcagtgaagtccaagccatgctcaatgtggaagctaaggatgtggatgctctctcaaggaccagaactgtcggtgaggttgtcaatgccatgaaggctgagatagctggaggctccgctcctgcgccggccgctgccgctcctggtcccgctgccgcggctccagctccagctgcagccgctccggccgtctcaaacgaactccttgaaaaagctgagaccgtcgtgatggaggtcttggcagctaaaaccggctatgagactgacatgattgagtctgacatggaattggagacagaacttgggatagacagcatcaaacgtgttgaaatcctcagtgaggtccaagctatgctgaacgtggaagcgaaggatgttgatgctctgtccagaacgaggaccgttggtgaggttgtggatgccatgaaggctgaaattgctggagggtctgcgcccgcgccagctgcagccgctcctgcacccgcagccgcggcacctgctccagctgcacctgcacctgccgtttcttcagaactcttggagaaggctgagacggttgtgatggaggttttggctgcaaagactggctatgagaccgacatgattgaatctgatatggaattggagacagagcttgggatcgattccatcaaaagagtggagatcctgagtgaagtccaagccatgctcaatgttgaagctaaggatgttgatgcactttcaagaacaaggacagtgggtgaggttgtggatgccatgaaggcggagattgctggagggagcgcgcctgcgccagctgccgcggcacctgcaccggcagccgcagctccagctccagctgcaccagcaccggccgcgcccgcgccagctgtttcatccgaactcctggaaaaggccgagacggttgtgatggaggtgctcgcagctaagactggttacgagaccgacatgattgaaagtgacatggagcttgaaaccgagttgggaatagatagcatcaaacgtgttgaaatcttgtctgaggtccaagctatgttgaacgtggaggcaaaagatgtcgatgcgctttcaagaaccagaacagtcggtgaggtcgtggacgccatgaaggctgaaattgccggaagctctgctagtgcgccagctgcagccgcacctgcacctgctgccgcggcacctgctccagctgcagccgctcctgccgtcagcaatgagttgctggagaaagccgaaacagttgtgatggaagtccttgctgcaaaaactggttacgaaacggacatgattgagtcagacatggaattggagaccgaacttggaatagattccatcaagagagtggagatcctctctgaggtgcaagccatgctcaacgttgaggctaaagatgttgatgcactcagtaggacaagaactgtgggggaagttgtcgatgcgatgaaggctgagattgctggaggctctgctcctgcgccggcagctgccgcacctgcacccgcagccgcggcaccagctgtcagcaacgaattgcttgagaaggctgaaacagttgtcatggaagtgctggctgcaaaaaccggctatgagactgacatgattgagtctgacatggaacttgagacggaattgggcattgacagcatcaagcgtgttgagatcctcagtgaagtccaagcaatgctcaatgtggaggctaaggatgtggatgccctctcaaggaccagaacagttggtgaggtcgttgatgcgatgaaggcggagatcgctggaagttccgcgcctgcgccagctgcagccgctcctgcacccgcagccgcggcaccggctccagctgcagccgcaccggccgtctcctcagaactcctggaaaaggctgagacagttgtgatggaagtccttgctgcgaaaactggctatgagaccgacatgattgaatctgacatggaactggagaccgagcttggaattgactccatcaaacgtgttgaaatcctctctgaggttcaagcgatgttgaatgtggaggccaaagatgttgatgctctttccagaacaaggacggtgggagaggtggttgatgccatgaaggctgagatagctgggggttctgctcctgcgccagctgcagccgctcctgctcccgctgccgcggcaccagctgtcagcaacgaactccttgaaaaagctgaaactgttgtgatggaggttttggctgcaaagactggatacgagactgacatgatagagtcagacatggagttggaaacagagcttgggattgatagcatcaagcgtgtggaaatcctttctgaggttcaagccatgctgaacgttgaggccaaagatgtcgatgctttgtcaaggaccagaacggttggagaagtggtcgatgccatgaaggctgagatagctggtggatcagcccctgctccggctgcagccgctcctgcaagtgccggtgctgcaccagctgtgaagattgattcagttcatggtgctgactgtgacgatttgtcactgatgcacgcaaaggtggttgacatcagaaggccagatgaactgattctggaaagaccggagaaccgtccagttcttgtcgttgacgatggctcagagttgacacttgctcttgtgagggtgttgggagcctgtgcagttgtcttgacctttgagggattgcagttggctcagagagctggtgcagctgccattcgtcatgttctggctaaggacctttcagcagaatcagctgagaaggccatcaaagaggctgagcaaagatttggagcgttgggaggcttcataagccagcaagcagaaaggtttgaaccagctgagatactgggtttcacactcatgtgtgcgaagtttgccaaagcctctctctgcactgctgtggctggaggtcgtcctgccttcatcggtgtggctaggcttgacggcagacttggattcacctctcaaggcacttctgacgcactcaagagagcacagcgtggagcgatctttggactctgcaagacaatagggttggagtggtcagaatctgatgtgttcagccgtggtgtggacattgctcaagggatgcacccagaagatgctgcagttgccatagttagggagatggcgtgtgctgacatcagaatcagagaggttgggattggagcaaaccagcaaagatgcacaatcagagctgccaagttggagactgggaaccctcagagacagatagcgaaagacgatgtgcttctggtttctggaggtgctcgtgggatcacacctctttgcatccgtgagatcacgcgtcagattgctggaggcaagtacattctgttgggtcgtagcaaagtttctgcgtctgaaccagcatggtgtgctggcatcactgatgagaaggctgtgcagaaagctgccacccaagagttgaagagggccttcagtgctggtgaaggacccaaacccactccaagggctgtcacgaaacttgtgggatctgttcttggtgctcgtgaagtgagaagctccattgctgccattgaagctctgggtggcaaagcgatctacagctcttgtgatgtgaactctgctgcagatgttgccaaagcagttagggatgcagagtcccagcttggtgccagagttagtggaatcgttcacgcttctggtgtgctccgtgatcgtctcatagagaagaaactccctgacgagtttgatgctgtctttgggaccaaagtcactgggttggagaatcttctggctgcagttgatcgtgccaacctcaaacacatggttctcttcagctcccttgctggtttccacggcaatgttggtcagtctgactatgcgatggcaaacgaagctctcaacaagatgggtttggaacttgcgaaggatgtcagtgtcaagtccatctgctttggtccctgggatggtgggatggtgacacctcaactcaagaaacagtttcaagaaatgggagttcagatcattcctcgtgaaggaggtgctgatacagttgcgaggattgtgttgggatcaagtcctgctgagatccttgttggaaactggaggacaccatccaagaaagttggaagtgacacgatcaccctgcatagaaagatcagtgccaagtccaatcccttcttggaggatcatgtcatacaaggcagaagggtgttgccaatgacccttgctattgggagccttgctgagacctgccttggactcttccctggctactctctctgggccatagatgacgcacagctcttcaaaggtgtcactgttgatggagacgtcaactgtgaagtgaccctcacaccgtccactgctccgagtgggagggtgaatgtccaagcgacgctcaagacgttctcaagtggaaaacttgttccagcctacagagctgtcatagtgttgtccaaccaaggtgctccacctgccaatgcaaccatgcagcctccgagccttgatgcagatcctgctttgcaagggtcagtctatgatggcaagactctctttcatggtcctgcgttcagaggcattgatgacgttctcagctgcaccaagagccagcttgttgccaagtgttctgctgttcctggatcagatgcagccagaggagagtttgcaactgacactgatgcacatgatccctttgtcaatgatcttgcctttcaagcaatgttggtctgggtgaggagaacgctgggacaagctgcactcccgaactccattcagaggatagtccaacacagaccggtcccacaagacaaacccttctacatcaccctcagatccaatcagagtggtggacatagccagcacaaacatgcacttcagttccacaacgaacaaggtgatctcttcattgatgttcaagcctctgtcattgcgacagactcacttgcgttctgagtagttagcttaatcacttaggtcaccctatcaaaatctatttagaaatacacaatattttgttgcaggcttgctggagaatcgatctgctatcataaaaattacaaaaaaattttatttgcctcaattattttaggattggtattaaggacgcttaaattatttgtcgggtcactacgcatcattgtgattgagaagatcagcgatacgaaatattcgtagtactatcgataatttatttgaaaattcataagaaaagcaaacgttacatgaattgatgaaacaatacaaagacagataaagccacgcacatttaggatattggccgagattactgaatattgagtaagatcacggaatttctgacaggagcatgtcttcaattcagcccaaatggcagttgaaatactcaaaccgccccatatgcaggagcggatcattcattgtttgtttggttgcctttgccaacatgggagtccaaggttgcggccgcttaattaagatgagtgatactcaggactcaggactcactctgctgatcactagtgctagcctcgaggtcgacacaactttgtatacaaaagttgtctagacctaggctcagcaactcatccagtcaagttcgagtcagtgagttgggcggccgcagatctgattggtaagatatgggtactgtttggtttatatgttttgactattcagtcactatggcccccataaattttaattcggctggtatgtctcggttaagaccggtttgacatggttcatttcagttcaattatgttaatctggcacgtgatatgtttaccttcacacgaacattagtaatgatgggctaatttaagacttaacaggcctagagaggcccatcttattacgtaacggcgtcgtttagagtgcaccaagcttataaatgaaaacgagctacctcgggacatcacgctctttgtacactccgccatctctctctctcgttggagcagatctctctcgtgaatatcgacaatggctgcaaggaacgtgagtgcggctcatgagatgcatgacgagaagaggatagctgttgtgggcatggctgttcagtatgctggatgcaaaacgaaagacgagttctgggaagttctcatgaatggaaaagttgagagcaaagtgatcagcgacaaacgtcttggttcaaattaccgtgctgaacactacaaagctgaaaggagcaagtatgctgacaccttctgcaatgagacatatggaactcttgatgagaacgaaatagacaatgagcatgaactccttttgaaccttgccaaacaagccttggctgaaacatctgtcaaagattcaacaagatgtggcatagtttctggatgcctcagcttcccgatggacaacctccaaggtgaactcttgaatgtgtaccagaaccatgttgagaagaaacttggtgccagagttttcaaagatgcctctcactggtcagaaagagaacagtccaacaaaccagaggctggtgacagaagaatcttcatggaccctgcttcctttgttgctgaggaactcaatcttggcgctctccactactctgttgatgctgcctgtgccactgcgctctatgtgctcagactggcgcaagatcacttggtctctggtgcagctgatgtgatgctttgtggtgcaacatgcctgccggagccgtttttcatactctctgggttctcaaccttccaagccatgcctgttggaacgggtcagaatgtgtccatgccgctgcacaaagattctcaaggattgacccctggtgaaggaggttccatcatggtcctcaaacgtttggatgacgcaatcagagatggagatcacatctatggaacacttttgggagccaatgtcagcaacagtggcactggtctgccacttaaaccccttttgccgtcagagaaaaagtgcctcatggacacctacacacgtatcaatgtgcatccccacaagattcagtatgttgaatgccatgcaactgggactccacaaggtgatcgtgtggaaattgatgctgtgaaggcttgctttgaaggcaaagtcccacgttttggaaccacaaaagggaactttggacacacattggtggcagctgggtttgctggcatgtgcaaagtgcttctctccatgaagcacgggatcattccacccactccgggaatagatgacgaaacgaagatggaccctctggttgtctctggtgaggccattccctggccagaaacgaatggagaaccgaagcgtgctggtctctcagcgtttggatttggtgggaccaatgctcatgctgtctttgaggaacatgacccaagcaatgctgcatgcactggccatgactccatttctgctctctctgcacgttgtggtggtgagtcaaacatgagaatagcaatcactgggatggatgccacttttggtgctttgaaaggattggatgcttttgaaagggccatctacactggtgctcatggtgctataccactcccagaaaagagatggagattcctggggaaagacaaggacttccttgatctttgtggagtcaaagcaacaccgcatggctgttacattgaagatgttgaagttgatttccagaggctgaggactccaatgactcctgaagatatgctcttgcctcaacagcttctggctgtcaccacaattgatagggccatattggactctggcatgaagaaaggtggaaatgtggctgtctttgtggggttggggaccgatcttgaactctaccgtcaccgtgcaagggttgctctcaaggagagagtgaggcctgaagccagcaagaaactcaatgacatgatgcagtacatcaatgattgtgggacaagcacttcttacaccagctacataggcaacttggttgcaacaagggtcagttcacaatggggcttcacgggaccttccttcacaatcacagaaggcaacaattctgtgtacagatgtgctgaacttggcaaatacctcttggaaacgggagaggttgatggggttgtggttgcgggtgttgatctctgtgggagtgctgagaacctttacgtcaagtcaaggcgtttcaaggtgtctacatctgacaccccgagagccagctttgatgcagctgctgatggttactttgttggagagggctgtggtgcatttgtgctcaagcgtgagacaagctgcaccaaggatgacagaatctatgcttgcatggatgccatagttcctggaaatgttccatctgcatgtttgagagaggcattggatcaagccagagtcaagcctggagacatcgagatgttggagctttctgctgattcagcgaggcatttgaaggacccgtctgttctcccaaaggaactcactgctgaggaagagattggcggacttcagacgattcttcgtgacgatgacaagctcccaaggaatgttgcaactggaagtgtcaaggccactgttggtgacactggttatgcttctggtgctgccagtttgattaaggctgcgctttgcatctacaaccgttacctgcccagcaatggagatgactgggatgaacctgcacctgaagcaccctgggacagcacactctttgcgtgccagacctcaagagcttggttgaagaaccctggtgagagacgttatgcggctgtttccggagtcagtgaaaccagaagttgctacagtgtgctgctttctgaagcagagggacactacgagagagagaacagaatcagtttggatgaggaagcacccaagctcattgtgttgagagcagactcccatgaagagattcttggaagattggacaagataagggaaaggttcttgcagcccacgggtgctgcacccagagagtctgaattgaaggcgcaagcccgtaggatctttcttgaactccttggtgagacccttgcccaagatgcagcttcatctggaagtcagaagccccttgctctcagcttggtctccactccatccaagctccagagagaggtggaacttgcggcaaaaggcattccgagatgtctcaagatgagacgtgattggagttcccctgctggaagcagatatgcgcctgagcctttggccagtgacagagttgccttcatgtatggagaaggaaggagcccttactatggcatcacacaagacattcataggatttggcctgaacttcatgaggtcatcaatgagaaaacaaaccgtctctgggctgaaggtgacagatgggtcatgccaagggccagcttcaagagtgagcttgagtcacaacagcaagagtttgacagaaacatgattgaaatgttccgtcttggaatcctcacctcaattgccttcacaaacctggcgagagatgttctcaacatcacgcccaaagcagcctttggactcagtttgggagagatttccatgatctttgctttctccaagaaaaacggtttgataagcgatcagttgacaaaggatttgagagagtcagatgtctggaacaaagctctggctgttgagttcaatgcgctcagagaagcctggggcattccacagtctgtcccaaaagatgagttctggcaaggttacatagtgaggggaacgaaacaagacatagaagcagccatagcaccagactcaaagtatgtgaggttgaccatcatcaatgatgccaacactgctctcatcagtggaaagcctgatgcatgcaaagctgcgattgctcgtcttggtggcaacatccctgcgcttccagtcactcaaggcatgtgtgggcattgcccagaggtgggaccttacaccaaggacatcgcaaagatccacgccaaccttgagttccctgtggttgatggtcttgatctctggactaccataaaccagaagaggcttgtgccaagagccacgggtgccaaagatgaatgggctccttcatcctttggggagtatgctggacagctctatgagaaacaagccaacttccctcagatagttgaaaccatctacaagcagaactatgatgtgtttgttgaagttgggccaaacaatcacagaagcacagcagtgagaaccacgcttggaccacagagaaaccaccttgctggtgccatagacaagcagaacgaggatgcttggacgacaatagtcaagctcgtggcttcattgaaggctcaccttgttcctggagtgaccatcagtccgctctaccactccaagctcgttgcagaggctgaggcttgttatgctgcgctctgtaaaggtgagaaacccaagaaaaacaagtttgtgagaaagattcagttgaatggcagattcaacagcaaggcagaccccatctcctcagcagaccttgcatccttcccacctgcggaccctgcgattgaagctgccatctcttcaaggatcatgaagcctgtggctccgaaattctatgcgcgtctcaacattgatgagcaagatgagaccagagatccgatcttgaacaaggacaatgcgccttccagctccagctcttccagcagttcctcttccagcagttcatctccgtctcctgctccttcagctccagttcagaagaaagctgccccagctgcggagacaaaagctgttgccagtgctgatgcacttcgtagtgccctgcttgatcttgactccatgcttgcgctcagctctgcaagtgcttctggcaaccttgttgagactgcgccatctgatgccagtgtcattgtccctccgtgcaacattgctgatcttggcagcagagctttcatgaaaacttatggtgtttctgcgcctctgtacaccggtgcaatggccaagggaattgcctctgcggacttggtgatcgcagctggaaggcaaggaatccttgcgtcatttggtgctggaggccttccaatgcaagttgtgcgtgagtccattgaaaagattcaagctgccctgcccaatggaccatatgctgtcaacctcatccattctccttttgacagcaaccttgagaagggaaatgttgatctcttcttggaaaagggtgtcacttttgttgaggcttcagccttcatgacgttgacaccgcaagttgtcagatacagagcggctgggttgacgaggaatgcagatgggtcagtcaacataaggaacagaatcattgggaaagtctccagaactgagctggctgaaatgttcatgcgtcctgcacctgagcatcttttgcagaagctcattgcttctggggagatcaatcaagaacaagctgagttggccagacgtgttcctgtggctgatgacattgcggttgaagctgattctggtggacacactgacaaccgtccaatccatgtcattctgcctctgattatcaacctgagggataggcttcacagagagtgtggatacccagcaaacctgagggttcgtgttggtgctgggggtggcattgggtgtccccaagctgcgctggcaactttcaacatgggtgcctctttcattgtcactggaacagtgaaccaagttgccaaacaatctgggacgtgtgacaatgtgaggaaacagcttgcgaaagcaacttactcagatgtttgcatggcaccggcagctgacatgtttgaggaaggtgtgaaacttcaagttttgaagaaaggaacaatgttcccttcaagagccaacaaactctatgagttgttctgcaagtatgattcttttgagtccatgcctccagcagagcttgcgagggttgagaaaagaatcttcagtcgtgcattggaagaggtctgggatgagaccaagaacttctacatcaaccgtctccacaacccagagaagatacagagggctgagagggaccccaaactgaagatgtcactgtgtttcagatggtatctgtccctggcttcaaggtgggccaacactggagcttctgacagagtcatggactaccaagtttggtgtggtcctgccattggttcattcaatgatttcatcaaaggaacttaccttgatccggcagtggcaaatgagtacccgtgtgttgtgcagatcaacaaacagattcttagaggagcgtgcttcttgaggcgtcttgaaatactgagaaatgcaaggctttcagatggtgcagctgcacttgtggcgagcattgatgacacatatgtccctgctgagaagctgtgagtagttagcttaatcacttaggtcaccctatcaaaatctatttagaaatacacaatattttgttgcaggcttgctggagaatcgatctgctatcataaaaattacaaaaaaattttatttgcctcaattattttaggattggtattaaggacgcttaaattatttgtcgggtcactacgcatcattgtgattgagaagatcagcgatacgaaatattcgtagtactatcgataatttatttgaaaattcataagaaaagcaaacgttacatgaattgatgaaacaatacaaagacagataaagccacgcacatttaggatattggccgagattactgaatattgagtaagatcacggaatttctgacaggagcatgtcttcaattcagcccaaatggcagttgaaatactcaaaccgccccatatgcaggagcggatcattcattgtttgtttggttgcctttgccaacatgggagtccaaggttgcggccgcttaattaatctgacctgaccactagacctgagtgagtacagatgtgctactagtgctagcctcgaggtcgaccaacttttctatacaaagttgtctagacctaggactaggcactgagtgactcactgacctgactgagtgactggcggccgcgcggccgcgaattcggaaatgggccaagtgaaatggaaatagagcttcaatccatttagtcccactcaaaatggtgctcgaattatatttagttacgttcgaatcagacaaccaagtatttggttaataaaaaccactcgcaacaaaggaaaaacaccaagcgcgtgcgtccaacatccgacggaaggggggtaatgtggtccgaaaaccttacaaaaatctgacgtcatctacccccgaaaacgttgaatcgtcaacgggggtagttttcgaattatcttttttttaggggcagttttattaatttgctctagaaattttatgattttaattaaaaaaagaaaaagaatatttgtatatttattttttatactctttttttgtccaactatttctcttattttggcaactttaactagactagtaacttatgtcaatgtgtatggatgcatgagagtgagtatacacatgtctaaatgcatgccttatgaaagcaacgcaccacaaaacgaagacccctttacaaatacatctcatcccttagtaccctcttactactgtcccgacacaaactcaaaacaaggatccacaaccaaaaatggcgcttcgtgtcaagaccaacaagaagccatgttgggagatgaccaaggaggaactgacctctggcaaaactgaggtgttcaactatgaggaactcctggagtttgcagagggtgacatagctaaggtttttggtccggagtttgctgtcatagacaagtaccccagaagggtgaggctgcctgctcgtgaatacctgcttgtgacaagggtcacactcatggatgccgaggtcaacaactacagagttggtgccagaatggtcactgagtatgatcttccagtgaatggcgaattgtctgagggaggtgattgtccctgggcagttctggttgagagtggacagtgcgatttgatgctgatatcatacatgggaattgatttccagaaccaaggtgacagagtttaccgtctgctcaacaccacgttgacattctatggggttgcccatgagggagagacccttgagtatgacatcagagtgaccggttttgccaaacgtttggatggtggcatctccatgttcttctttgagtatgactgctatgtcaatgggaggcttctcattgagatgagagatggctgtgctggcttcttcacaaatgaggagcttgatgcgggaaagggtgtggtgttcacaagaggggatttggctgccagagctaagattccaaagcaagatgtttctccctatgctgtcgctccctgccttcacaaaacaaaactcaacgaaaaggagatgcagaccttggttgacaaagattgggcttccgtttttggctcaaagaatggcatgccggagatcaactacaaactctgcgcacgtaagatgctcatgattgatagagtcaccagcattgaccataagggaggtgtgtacggtttgggtcagttggttggtgagaaaatcttggagagggaccattggtacttcccatgccattttgttaaggatcaagtcatggctggatctcttgtcagcgacggttgttcacaaatgctcaagatgtacatgatctggctcggtttgcaccttaccaccggaccatttgacttcagacccgtcaacggacacccgaacaaagttaggtgtaggggtcagatatctcctcataagggaaagttggtctacgtcatggagatcaaagagatgggattcgacgaggataacgatccgtacgccattgctgacgtcaacatcattgacgttgatttcgaaaagggtcaagatttcagccttgatagaatcagcgactacggaaagggggatcttaacaaaaagatcgtcgtggacttcaagggcattgctctcaagatgcagaagagatccacgaacaagaacccctccaaagttcagcccgtttttgctaacggtgcagccactgtgggaccggaagcgtccaaggccagctctggtgccagtgctagtgcttctgctgcccctgcgaagcctgctttctcagcagatgttcttgcgccaaagccagttgcacttcctgaacatatcctcaagggtgacgctctcgctccgaaagaaatgtcctggcatcccatgtcaaaacttcctggcaacccgacgccgttcttctcccctagttcttaccctccgagggcaatttgcttcatccctttccctggcaacccacttgacaacaattgcaaagctggagaaatgcctctgaactggtacaacatgtcagagttcatgtgtggaaaagttagcaactgcttgggaccagagttcgcaagatttgataagtcaaatacgagcagaagccctgcttttgatttggctcttgtgactagagttgttgaagtcacaaacatggaacatggcaagttcctgaatgttgattgcaatcccagcaaaggcacaatggtgggggagtttgactgtcctcaagatgcgtggttctttgatggttcttgcaatgatgggcacatgccttattccatcatcatggaaatcggacttcagacatccggtgttctcaccagtgtgttgaaagcaccactgacgatggacaaagatgacattctctttaggaaccttgatgcaagtgctgaaatggtgaggccagatgtggatgtgagggggaaaaccataaggaatgtgaccaagtgcactggatatgcaatgttgggaaagatggggattcacagattcacgtttgagttgtctgttgatggcgtggttttctacaaaggaagcacttcctttggatggttcactccagaggtgtttgctcagcaagctggacttgacaatgggaaaaagacggagccttggtgcaaaactaacaacacgagtgtgagaagagttgaaatcgcatcagccaaaggcaaagaacagctgactgagaaacttccagatgcaactaatgctcaagttctcagaaggtcagaacagtgtgagtatttggattacctcaacattgctcctgattctgggctgcatgggaaaggatatgcgcatggacacaaagatgttaacccacaagactggttcttctcttgtcacttttggtttgatcctgtgatgcctggatctttgggaattgagtcaatgttccagctcattgaggcatttgcggtggaccagaacataccgggagaatacaatgtgagcaatccgacctttgcccatgcccctggaaaaacggcgtggaagtaccgtggtcaattgacaccaaagaaccgtgcgatggactgtgaggtgcacatagtttcaatcacagcctctcctgaaaatggaggctacgttgacatagtggcagatggagcactttgggttgatggtctccgtgtgtatgaagccaaagaactcagagttcgtgttgtcagtgcaaaacctcaagccattccggatgttcaacaacagccacccagcgcaaaagcggaccctgggaaaactggagttgcactcagtccgactcagttgagagatgtcctgcttgaagtggacaatccattgtatcttggtgttgaaaactccaatttggtgcagtttgaatccaaacctgcaacttcttcaaggattgtcagtatcaaaccatgctccataagtgatcttggtgacaagtccttcatggaaacgtacaatgtgtcagcacctctgtacactggagcaatggccaagggaattgcgtctgcggaccttgtcattgctgctgggaagaggaagatattgggttcttttggagcgggtgggcttccaatgcaccatgtgagggcagctttggagaagatacaagcggctctgcctcaaggaccatatgctgtgaacctcattcattcaccttttgacagcaacttggaaaaggggaatgttgatctcttcctcgaaaagggcgttactgtggtggaggcttctgcattcatgaccctcactccccaagttgttcgttaccgtgcagccggactctcaaggaacgctgatgggagtgtcaacatcagaaaccgtatcattggaaaagtgtccagaacagaactcgccgaaatgttcatcagaccggctccggaacacctccttgagaaactcatagcttctggtgagataacacaagaacaagccgaacttgcccgtcgtgttcctgtcgcagacgacatcgctgttgaagctgattctggtggtcacactgacaaccgtcccatccacgtcatcttgcctttgatcatcaaccttaggaacagactgcacagagagtgtggttatcctgcgcaccttagagtcagagttggagctggaggcggtgttggctgcccacaagctgctgcggctgccctcacaatgggagctgccttcatagtgactgggactgtcaatcaagttgctaaacagtccgggacatgtgacaacgtgagaaaacaactcagtcaagccacctacagtgacatttgcatggctccagcagctgatatgtttgaggaaggtgtgaaactccaagttctcaagaagggaacaatgttcccatcaagagctaacaaattgtacgaactcttttgcaagtacgactctttcgattcaatgcctcctgctgaacttgaaaggatcgagaagaggatcttcaagagggcacttcaagaggtctgggaagagaccaaggacttttacatcaatggtttgaagaatccagagaagatacagagagcggaacatgaccccaaactcaagatgtctttgtgtttcagatggtatcttggtcttgcatcacgttgggccaacatgggtgctcctgatcgtgtcatggactatcaagtctggtgtggtccagccattggagccttcaatgacttcatcaaaggaacatatcttgatcctgctgtctctaatgagtacccatgtgttgtccagatcaaccttcagattttgcgtggtgcatgttacctgaggcgtcttaatgctctgagaaatgatccgaggattgatcttgagactgaagatgctgcctttgtctatgagccaacgaatgcgctttgagtagttagcttaatcacttaggtcaccctatcaaaatctatttagaaatacacaatattttgttgcaggcttgctggagaatcgatctgctatcataaaaattacaaaaaaattttatttgcctcaattattttaggattggtattaaggacgcttaaattatttgtcgggtcactacgcatcattgtgattgagaagatcagcgatacgaaatattcgtagtactatcgataatttatttgaaaattcataagaaaagcaaacgttacatgaattgatgaaacaatacaaagacagataaagccacgcacatttaggatattggccgagattactgaatattgagtaagatcacggaatttctgacaggagcatgtcttcaattcagcccaaatggcagttgaaatactcaaaccgccccatatgcaggagcggatcattcattgtttgtttggttgcctttgccaacatgggagtccaaggttgcggccgcttaattaatcacgagtggatgactgtcacgactgactcatgactgactactagtgctagcctcgaggtcgacacaactttgtataataaagttgtctagacctaggagctgtgctgggtaactcacatgagtcactggtcacatcagcggccgcagatctgattggtaagatatgggtactgtttggtttatatgttttgactattcagtcactatggcccccataaattttaattcggctggtatgtctcggttaagaccggtttgacatggttcatttcagttcaattatgttaatctggcacgtgatatgtttaccttcacacgaacattagtaatgatgggctaatttaagacttaacaggcctagagaggcccatcttattacgtaacggcgtcgtttagagtgcaccaagcttataaatgaaaacgagctacctcgggacatcacgctctttgtacactccgccatctctctctctcgttggagcagatctctctcgtgaatatcgacaatgcttcagcacacttggcttccgaagcctcccaatctgaccctcttgtcagatgaggttcatctctggaggattcctcttgaccagcctgagtcacaacttcaagaccttgctgccaccctgagcagtgatgaattggcgagggcaaacagattctactttccagaacacagaaggcgtttcactgctgggagaggcatcctcagatccatcttgggtggatacttgggagtggaaccgggtcaagtcaagtttgattatgagtcccgtgggaaaccgatccttggtgacagatttgctgagagtggactcctgttcaacttgtctcacagccagaaccttgccttgtgtgctgtcaactacacgcgtcaaataggcattgatcttgaatatctgcgtccaacatctgacttggagtctcttgcaaagaggttctttctcccaagagaatatgaactcttgaggtcactccctgatgagcagaaacagaagattttctttcgttactggacttgcaaagaggcttatctcaaagcaacgggagatggaatagccaaacttgaagagatcgagatagcactcaccccaacagaacctgccaagctccaaacagctcctgcgtggtctctgttggagcttgtgccagatgacaattgtgttgcagctgtggctgttgcgggttttggttggcagcccaagttctggcattactgagtagttagcttaatcacttaggtcaccctatcaaaatctatttagaaatacacaatattttgttgcaggcttgctggagaatcgatctgctatcataaaaattacaaaaaaattttatttgcctcaattattttaggattggtattaaggacgcttaaattatttgtcgggtcactacgcatcattgtgattgagaagatcagcgatacgaaatattcgtagtactatcgataatttatttgaaaattcataagaaaagcaaacgttacatgaattgatgaaacaatacaaagacagataaagccacgcacatttaggatattggccgagattactgaatattgagtaagatcacggaatttctgacaggagcatgtcttcaattcagcccaaatggcagttgaaatactcaaaccgccccatatgcaggagcggatcattcattgtttgtttggttgcctttgccaacatgggagtccaaggttgcggccgcttaattaactactgtcactgaggccgtagacgagtacggactgatctaactagtgctagcctcgaggtcgacacccagctttcttgtacaaagtggttgcggccgcttaattaaatttaaattcaattaatgcaatcttgattttcaacaacgaaggtaatggcgtaaaagaaaaaatgtatgttattgtattgatctttcatgatgttgaagcgtgccataatatgatgatgtataattaaaatattaactgtcgcattttattgaaatggcactgttatttcaaccatatctttgattctgttacatgacacgactgcaagaagtaaataatagacgccgttgttaaagaattgctatcatatgtgcctaactagagggaatttgagcgtcagacctaatcaaatattacaaaatatctcactctgtcgccagcaatggtgtaatcagcgcagacaaatggcgtaaagatcgcggaaaaacctccccgagtggcatgatagctgcctctgtattgctgatttagtcagccttatttgacttaagggtgccctcgttagtgacaaattgctttcaaggagacagccatgccccacactttgttgaaaaacaaattgcctttggggagacggtaaagccagttgctcttcaataaggaatgtcgaggaggcaatgtaaccgcctctggtagtacacttctctaatccaaaaatcaatttgtattcaagataccgcaaaaaacttatggtttaaaccctgcaggactagtccagaaggtaattatccaagatgtagcatcaagaatccaatgtttacgggaaaaactatggaagtattatgtaagctcagcaagaagcagatcaatatgcggcacatatgcaacctatgttcaaaaatgaagaatgtacagatacaagatcctatactgccagaatacgaagaagaatacgtagaaattgaaaaagaagaaccaggcgaagaaaagaatcttgaagacgtaagcactgacgacaacaatgaaaagaagaagataaggtcggtgattgtgaaagagacatagaggacacatgtaaggtggaaaatgtaagggcggaaagtaaccttatcacaaaggaatcttatcccccactacttatccttttatatttttccgtgtcatttttgcccttgagttttcctatataaggaaccaagttcggcatttgtgaaaacaagaaaaaatttggtgtaagctattttctttgaagtactgaggatacaacttcagagaaatttgtaagtttgtaggtaccagatctggatcccaaaccatgtctccggagaggagaccagttgagattaggccagctacagcagctgatatggccgcggtttgtgatatcgttaaccattacattgagacgtctacagtgaactttaggacagagccacaaacaccacaagagtggattgatgatctagagaggttgcaagatagatacccttggttggttgctgaggttgagggtgttgtggctggtattgcttacgctgggccctggaaggctaggaacgcttacgattggacagttgagagtactgtttacgtgtcacataggcatcaaaggttgggcctaggatctacattgtacacacatttgcttaagtctatggaggcgcaaggttttaagtctgtggttgctgttataggccttccaaacgatccatctgttaggttgcatgaggctttgggatacacagcccggggtacattgcgcgcagctggatacaagcatggtggatggcatgatgttggtttttggcaaagggattttgagttgccagctcctccaaggccagttaggccagttacccaaatctgagtagttagcttaatcacctagagctcgatcggcggcaatagcttcttagcgccatcccgggttgatcctatctgtgttgaaatagttgcggtgggcaaggctctctttcagaaagacaggcggccaaaggaacccaaggtgaggtgggctatggctctcagttccttgtggaagcgcttggtctaaggtgcagaggtgttagcgggatgaagcaaaagtgtccgattgtaacaagatatgttgatcctacgtaaggatattaaagtatgtattcatcactaatataatcagtgtattccaatatgtactacgatttccaatgtctttattgtcgccgtatgtaatcggcgtcacaaaataatccccggtgactttcttttaatccaggatgaaataatatgttattataatttttgcgatttggtccgttataggaattgaagtgtgcttgaggtcggtcgccaccactcccatttcataattttacatgtatttgaaaaataaaaatttatggtattcaatttaaacacgtatacttgtaaagaatgatatcttgaaagaaatatagtttaaatatttattgataaaataacaagtcaggtattatagtccaagcaaaaacataaatttattgatgcaagtttaaattcagaaatatttcaataactgattatatcagctggtacattgccgtagatgaaagactgagtgcgatattatggtgtaatacataggaattcgtttaaacgatctgcgtctaattttcggtccaacttgcacaggaaagacgtcgaccgcggtagctcttgcccagcagactgggcttccagtcctttcgctcgatcgggtccaatgttgtcctcagctgtgaaccggaagcggacgaccaacagtggaagaactgaaaggaacgagccgtctataccttgatgatcggcctctggtgaagggtatcatcgcagccaagcaagctcatgaaaggctgatgggggaggtgtataattatgaggcccacggcgggcttattctttagggaggatctatctcgttgctcaagtgcatggcgcaaagcagttattggagtgcggattttcgttggcatattattcgccacgagttagcagacgaagagaccttcatgaacgtggccaaggccagagttaagcagatgttacgccctgctgcaggcctttctattatccaatagttggttgatctttggaaagagcctcggctgaggcccatactgaaagagatcgatggatatcgatatgccatgttgtttgctagccagaaccagatcacatccgatatgctattgcagcttgacgcagatatggaggataagttgattcatgggatcgctcaggagtagctcatccatgcacgccgacaagaacagaaattccgtcgagttaacgcagccgcttacgacggattcgaaggtcatccattcggaatgtattagtttgcaccagctccgcgtcacacctgtcttcatttgaataagatgttagcaattgtttttagctttgtcttgttgtggcagggcggcaagtgcttcagacatcattctgttttcaaattttatgctggagaacagcttcttaattcctttggaaataatagactgcgtcttaaaattcagatgtctggatatagatatgattgtaaaataacctatttaagtgtcatttagaacataagttttatgaatgttcttccattttcgtcatcgaacgaataagagtaaatacaccttttttaacattacaaataagttcttatacgttgtttatacaccgggaatcatttccattattttcgcgcaaaagtcacggatattcgtgaaagcgacataaactgcgaaatttgcggggagtgtcttgagtttgcctcgaggctagcgcatgcacatagacacacacatcatctcattgatgcttggtaataattgtcattagattgtttttatgcatagatgcactcgaaatcagccaattttagacaagtatcaaacggatgtgacttcagtacattaaaaacgtccgcaatgtgttattaagttgtctaagcgtcaatttgatttacaattgaatatatcctgccccagccagccaacagctcgatttacaattgaatatatcctgccggccggcccacgcgtgtcgaggaattctgatctggcccccatttggacgtgaatgtagacacgtcgaaataaagatttccgaattagaataatttgtttattgctttcgcctataaatacgacggatcgtaatttgtcgttttatcaaaatgtactttcattttataataacgctgcggacatctacatttttgaattgaaaaaaaattggtaattactctttctttttctccatattgaccatcatactcattgctgatccatgtagatttcccggacatgaagccatttacaattgaatatatcctgccgccgctgccgctttgcacccggtggagcttgcatgttggtttctacgcagaactgagccggttaggcagataatttccattgagaactgagccatgtgcaccttccccccaacacggtgagcgacggggcaacggagtgatccacatgggacttttaaacatcatccgtcggatggcgttgcgagagaagcagtcgatccgtgagatcagccgacgcaccgggcaggcgcgcaacacgatcgcaaagtatttgaacgcaggtacaatcgagccgacgttcacgcggaacgaccaagcaagcttggctgccatttttggggtgaggccgttcgcggccgaggggcgcagcccctggggggatgggaggcccgcgttagcgggccgggagggttcgagaagggggggcaccccccttcggcgtgcgcggtcacgcgcacagggcgcagccctggttaaaaacaaggtttataaatattggtttaaaagcaggttaaaagacaggttagcggtggccgaaaaacgggcggaaacccttgcaaatgctggattttctgcctgtggacagcccctcaaatgtcaataggtgcgcccctcatctgtcagcactctgcccctcaagtgtcaaggatcgcgcccctcatctgtcagtagtcgcgcccctcaagtgtcaataccgcagggcacttatccccaggcttgtccacatcatctgtgggaaactcgcgtaaaatcaggcgttttcgccgatttgcgaggctggccagctccacgtcgccggccgaaatcgagcctgcccctcatctgtcaacgccgcgccgggtgagtcggcccctcaagtgtcaacgtccgcccctcatctgtcagtgagggccaagttttccgcgaggtatccacaacgccggcggccgcggtgtctcgcacacggcttcgacggcgtttctggcgcgtttgcagggccatagacggccgccagcccagcggcgagggcaaccagcccggtgagcgtcggaaagggtcgacggatcttttccgctgcataaccctgcttcggggtcattatagcgattttttcggtatatccatcctttttcgcacgatatacaggattttgccaaagggttcgtgtagactttccttggtgtatccaacggcgtcagccgggcaggataggtgaagtaggcccacccgcgagcgggtgttccttcttcactgtcccttattcgcacctggcggtgctcaacgggaatcctgctctgcgaggctggccggctaccgccggcgtaacagatgagggcaagcggatggctgatgaaaccaagccaaccaggaagggcagcccacctatcaaggtgtactgccttccagacgaacgaagagcgattgaggaaaaggcggcggcggccggcatgagcctgtcggcctacctgctggccgtcggccagggctacaaaatcacgggcgtcgtggactatgagcacgtccgcgagctggcccgcatcaatggcgacctgggccgcctgggcggcctgctgaaactctggctcaccgacgacccgcgcacggcgcggttcggtgatgccacgatcctcgccctgctggcgaagatcgaagagaagcaggacgagcttggcaaggtcatgatgggcgtggtccgcccgagggcagagccatgacttttttagccgctaaaacggccggggggtgcgcgtgattgccaagcacgtccccatgcgctccatcaagaagagcgacttcgcggagctggtattcgtgcagggcaagattcggaataccaagtacgagaaggacggccagacggtctacgggaccgacttcattgccgataaggtggattatctggacaccaaggcaccaggcgggtcaaatcaggaataagggcacattgccccggcgtgagtcggggcaatcccgcaaggagggtgaatgaatcggacgtttgaccggaaggcatacaggcaagaactgatcgacgcggggttttccgccgaggatgccgaaaccatcgcaagccgcaccgtcatgcgtgcgccccgcgaaaccttccagtccgtcggctcgatggtccagcaagctacggccaagatcgagcgcgacagcgtgcaactggctccccctgccctgcccgcgccatcggccgccgtggagcgttcgcgtcgtctcgaacaggaggcggcaggtttggcgaagtcgatgaccatcgacacgcgaggaactatgacgaccaagaagcgaaaaaccgccggcgaggacctggcaaaacaggtcagcgaggccaagcaggccgcgttgctgaaacacacgaagcagcagatcaaggaaatgcagctttccttgttcgatattgcgccgtggccggacacgatgcgagcgatgccaaacgacacggcccgctctgccctgttcaccacgcgcaacaagaaaatcccgcgcgaggcgctgcaaaacaaggtcattttccacgtcaacaaggacgtgaagatcacctacaccggcgtcgagctgcgggccgacgatgacgaactggtgtggcagcaggtgttggagtacgcgaagcgcacccctatcggcgagccgatcaccttcacgttctacgagctttgccaggacctgggctggtcgatcaatggccggtattacacgaaggccgaggaatgcctgtcgcgcctacaggcgacggcgatgggcttcacgtccgaccgcgttgggcacctggaatcggtgtcgctgctgcaccgcttccgcgtcctggaccgtggcaagaaaacgtcccgttgccaggtcctgatcgacgaggaaatcgtcgtgctgtttgctggcgaccactacacgaaattcatatgggagaagtaccgcaagctgtcgccgacggcccgacggatgttcgactatttcagctcgcaccgggagccgtacccgctcaagctggaaaccttccgcctcatgtgcggatcggattccacccgcgtgaagaagtggcgcgagcaggtcggcgaagcctgcgaagagttgcgaggcagcggcctggtggaacacgcctgggtcaatgatgacctggtgcattgcaaacgctagggccttgtggggtcagttccggctgggggttcagcagccagcgctttactggcatttcaggaacaagcgggcactgctcgacgcacttgcttcgctcagtatcgctcgggacgcacggcgcgctctacgaactgccgataaacagaggattaaaattgacaattgtgattaaggctcagattcgacggcttggagcggccgacgtgcaggatttccgcgagatccgattgtcggccctgaagaaagctccagagatgttcgggtccgtttacgagcacgaggagaaaaagcccatggaggcgttcgctgaacggttgcgagatgccgtggcattcggcgcctacatcgacggcgagatcattgggctgtcggtcttcaaacaggaggacggccccaaggacgctcacaaggcgcatctgtccggcgttttcgtggagcccgaacagcgaggccgaggggtcgccggtatgctgctgcgggcgttgccggcgggtttattgctcgtgatgatcgtccgacagattccaacgggaatctggtggatgcgcatcttcatcctcggcgcacttaatatttcgctattctggagcttgttgtttatttcggtctaccgcctgccgggcggggtcgcggcgacggtaggcgctgtgcagccgctgatggtcgtgttcatctctgccgctctgctaggtagcccgatacgattgatggcggtcctgggggctatttgcggaactgcgggcgtggcgctgttggtgttgacaccaaacgcagcgctagatcctgtcggcgtcgcagcgggcctggcgggggcggtttccatggcgttcggaaccgtgctgacccgcaagtggcaacctcccgtgcctctgctcacctttaccgcctggcaactggcggccggaggacttctgctcgttccagtagctttagtgtttgatccgccaatcccgatgcctacaggaaccaatgttctcggcctggcgtggctcggcctgatcggagcgggtttaacctacttcctttggttccgggggatctcgcgactcgaacctacagttgtttccttactgggctttctcagcccccgagcgcttagtgggaatttgtaccccttatcgaaccgggagcacaggatgacgcctaacaattcattcaagccgacaccgcttcgcggcgcggcttaattcaggagttaaacatcatgagggaagcggtgatcgccgaagtatcgactcaactatcagaggtagttggcgtcatcgagcgccatctcgaaccgacgttgctggccgtacatttgtacggctccgcagtggatggcggcctgaagccacacagtgatattgatttgctggttacggtgaccgtaaggcttgatgaaacaacgcggcgagctttgatcaacgaccttttggaaacttcggcttcccctggagagagcgagattctccgcgctgtagaagtcaccattgttgtgcacgacgacatcattccgtggcgttatccagctaagcgcgaactgcaatttggagaatggcagcgcaatgacattcttgcaggtatcttcgagccagccacgatcgacattgatctggctatcttgctgacaaaagcaagagaacatagcgttgccttggtaggtccagcggcggaggaactctttgatccggttcctgaacaggatctatttgaggcgctaaatgaaaccttaacgctatggaactcgccgcccgactgggctggcgatgagcgaaatgtagtgcttacgttgtcccgcatttggtacagcgcagtaaccggcaaaatcgcgccgaaggatgtcgctgccgactgggcaatggagcgcctgccggcccagtatcagcccgtcatacttgaagctaggcaggcttatcttggacaagaagatcgcttggcctcgcgcgcagatcagttggaagaatttgttcactacgtgaaaggcgagatcaccaaggtagtcggcaaataatgtctaacaattcgttcaagccgacgccgcttcgcggcgcggcttaactcaagcgttagagagctggggaagactatgcgcgatctgttgaaggtggttctaagcctcgtcttgcgatggcatttcgatccattcccattccgcgctcaagatggcttcccctcggcagttcatcagggctaaatcaatctagccgacttgtccggtgaaatgggctgcactccaacagaaacaatcaaacaaacatacacagcgacttattcacacgagctca

SEQ ID NO: 48 - DNA, 38762 bp, Artificial sequence
  plasmid pDAB7379
cttgtacaaagtggttgcggccgcttaattaaatttaaattcaattaatgcaatcttgattttcaacaacgaaggtaatggcgtaaaagaaaaaatgtatgttattgtattgatctttcatgatgttgaagcgtgccataatatgatgatgtataattaaaatattaactgtcgcattttattgaaatggcactgttatttcaaccatatctttgattctgttacatgacacgactgcaagaagtaaataatagacgccgttgttaaagaattgctatcatatgtgcctaactagagggaatttgagcgtcagacctaatcaaatattacaaaatatctcactctgtcgccagcaatggtgtaatcagcgcagacaaatggcgtaaagatcgcggaaaaacctccccgagtggcatgatagctgcctctgtattgctgatttagtcagccttatttgacttaagggtgccctcgttagtgacaaattgctttcaaggagacagccatgccccacactttgttgaaaaacaaattgcctttggggagacggtaaagccagttgctcttcaataaggaatgtcgaggaggcaatgtaaccgcctctggtagtacacttctctaatccaaaaatcaatttgtattcaagataccgcaaaaaacttatggtttaaaccctgcaggactagtccagaaggtaattatccaagatgtagcatcaagaatccaatgtttacgggaaaaactatggaagtattatgtaagctcagcaagaagcagatcaatatgcggcacatatgcaacctatgttcaaaaatgaagaatgtacagatacaagatcctatactgccagaatacgaagaagaatacgtagaaattgaaaaagaagaaccaggcgaagaaaagaatcttgaagacgtaagcactgacgacaacaatgaaaagaagaagataaggtcggtgattgtgaaagagacatagaggacacatgtaaggtggaaaatgtaagggcggaaagtaaccttatcacaaaggaatcttatcccccactacttatccttttatatttttccgtgtcatttttgcccttgagttttcctatataaggaaccaagttcggcatttgtgaaaacaagaaaaaatttggtgtaagctattttctttgaagtactgaggatacaacttcagagaaatttgtaagtttgtaggtaccagatctggatcccaaaccatgtctccggagaggagaccagttgagattaggccagctacagcagctgatatggccgcggtttgtgatatcgttaaccattacattgagacgtctacagtgaactttaggacagagccacaaacaccacaagagtggattgatgatctagagaggttgcaagatagatacccttggttggttgctgaggttgagggtgttgtggctggtattgcttacgctgggccctggaaggctaggaacgcttacgattggacagttgagagtactgtttacgtgtcacataggcatcaaaggttgggcctaggatctacattgtacacacatttgcttaagtctatggaggcgcaaggttttaagtctgtggttgctgttataggccttccaaacgatccatctgttaggttgcatgaggctttgggatacacagcccggggtacattgcgcgcagctggatacaagcatggtggatggcatgatgttggtttttggcaaagggattttgagttgccagctcctccaaggccagttaggccagttacccaaatctgagtagttagcttaatcacctagagctcgatcggcggcaatagcttcttagcgccatcccgggttgatcctatctgtgttgaaatagttgcggtgggcaaggctctctttcagaaagacaggcggccaaaggaacccaaggtgaggtgggctatggctctcagttccttgtggaagcgcttggtctaaggtgcagaggtgttagcgggatgaagcaaaagtgtccgattgtaacaagatatgttgatcctacgtaaggatattaaagtatgtattcatcactaatataatcagtgtattccaatatgtactacgatttccaatgtctttattgtcgccgtatgtaatcggcgtcacaaaataatccccggtgactttcttttaatccaggatgaaataatatgttattataatttttgcgatttggtccgttataggaattgaagtgtgcttgaggtcggtcgccaccactcccatttcataattttacatgtatttgaaaaataaaaatttatggtattcaatttaaacacgtatacttgtaaagaatgatatcttgaaagaaatatagtttaaatatttattgataaaataacaagtcaggtattatagtccaagcaaaaacataaatttattgatgcaagtttaaattcagaaatatttcaataactgattatatcagctggtacattgccgtagatgaaagactgagtgcgatattatggtgtaatacataggaattcgtttaaacgatctgcgtctaattttcggtccaacttgcacaggaaagacgtcgaccgcggtagctcttgcccagcagactgggcttccagtcctttcgctcgatcgggtccaatgttgtcctcagctgtgaaccggaagcggacgaccaacagtggaagaactgaaaggaacgagccgtctataccttgatgatcggcctctggtgaagggtatcatcgcagccaagcaagctcatgaaaggctgatgggggaggtgtataattatgaggcccacggcgggcttattctttagggaggatctatctcgttgctcaagtgcatggcgcaaagcagttattggagtgcggattttcgttggcatattattcgccacgagttagcagacgaagagaccttcatgaacgtggccaaggccagagttaagcagatgttacgccctgctgcaggcctttctattatccaatagttggttgatctttggaaagagcctcggctgaggcccatactgaaagagatcgatggatatcgatatgccatgttgtttgctagccagaaccagatcacatccgatatgctattgcagcttgacgcagatatggaggataagttgattcatgggatcgctcaggagtagctcatccatgcacgccgacaagaacagaaattccgtcgagttaacgcagccgcttacgacggattcgaaggtcatccattcggaatgtattagtttgcaccagctccgcgtcacacctgtcttcatttgaataagatgttagcaattgtttttagctttgtcttgttgtggcagggcggcaagtgcttcagacatcattctgttttcaaattttatgctggagaacagcttcttaattcctttggaaataatagactgcgtcttaaaattcagatgtctggatatagatatgattgtaaaataacctatttaagtgtcatttagaacataagttttatgaatgttcttccattttcgtcatcgaacgaataagagtaaatacaccttttttaacattacaaataagttcttatacgttgtttatacaccgggaatcatttccattattttcgcgcaaaagtcacggatattcgtgaaagcgacataaactgcgaaatttgcggggagtgtcttgagtttgcctcgaggctagcgcatgcacatagacacacacatcatctcattgatgcttggtaataattgtcattagattgtttttatgcatagatgcactcgaaatcagccaattttagacaagtatcaaacggatgtgacttcagtacattaaaaacgtccgcaatgtgttattaagttgtctaagcgtcaatttgatttacaattgaatatatcctgccccagccagccaacagctcgatttacaattgaatatatcctgccggccggcccacgcgtgtcgaggaattctgatctggcccccatttggacgtgaatgtagacacgtcgaaataaagatttccgaattagaataatttgtttattgctttcgcctataaatacgacggatcgtaatttgtcgttttatcaaaatgtactttcattttataataacgctgcggacatctacatttttgaattgaaaaaaaattggtaattactctttctttttctccatattgaccatcatactcattgctgatccatgtagatttcccggacatgaagccatttacaattgaatatatcctgccgccgctgccgctttgcacccggtggagcttgcatgttggtttctacgcagaactgagccggttaggcagataatttccattgagaactgagccatgtgcaccttccccccaacacggtgagcgacggggcaacggagtgatccacatgggacttttaaacatcatccgtcggatggcgttgcgagagaagcagtcgatccgtgagatcagccgacgcaccgggcaggcgcgcaacacgatcgcaaagtatttgaacgcaggtacaatcgagccgacgttcacgcggaacgaccaagcaagcttggctgccatttttggggtgaggccgttcgcggccgaggggcgcagcccctggggggatgggaggcccgcgttagcgggccgggagggttcgagaagggggggcaccccccttcggcgtgcgcggtcacgcgcacagggcgcagccctggttaaaaacaaggtttataaatattggtttaaaagcaggttaaaagacaggttagcggtggccgaaaaacgggcggaaacccttgcaaatgctggattttctgcctgtggacagcccctcaaatgtcaataggtgcgcccctcatctgtcagcactctgcccctcaagtgtcaaggatcgcgcccctcatctgtcagtagtcgcgcccctcaagtgtcaataccgcagggcacttatccccaggcttgtccacatcatctgtgggaaactcgcgtaaaatcaggcgttttcgccgatttgcgaggctggccagctccacgtcgccggccgaaatcgagcctgcccctcatctgtcaacgccgcgccgggtgagtcggcccctcaagtgtcaacgtccgcccctcatctgtcagtgagggccaagttttccgcgaggtatccacaacgccggcggccgcggtgtctcgcacacggcttcgacggcgtttctggcgcgtttgcagggccatagacggccgccagcccagcggcgagggcaaccagcccggtgagcgtcggaaagggtcgacggatcttttccgctgcataaccctgcttcggggtcattatagcgattttttcggtatatccatcctttttcgcacgatatacaggattttgccaaagggttcgtgtagactttccttggtgtatccaacggcgtcagccgggcaggataggtgaagtaggcccacccgcgagcgggtgttccttcttcactgtcccttattcgcacctggcggtgctcaacgggaatcctgctctgcgaggctggccggctaccgccggcgtaacagatgagggcaagcggatggctgatgaaaccaagccaaccaggaagggcagcccacctatcaaggtgtactgccttccagacgaacgaagagcgattgaggaaaaggcggcggcggccggcatgagcctgtcggcctacctgctggccgtcggccagggctacaaaatcacgggcgtcgtggactatgagcacgtccgcgagctggcccgcatcaatggcgacctgggccgcctgggcggcctgctgaaactctggctcaccgacgacccgcgcacggcgcggttcggtgatgccacgatcctcgccctgctggcgaagatcgaagagaagcaggacgagcttggcaaggtcatgatgggcgtggtccgcccgagggcagagccatgacttttttagccgctaaaacggccggggggtgcgcgtgattgccaagcacgtccccatgcgctccatcaagaagagcgacttcgcggagctggtattcgtgcagggcaagattcggaataccaagtacgagaaggacggccagacggtctacgggaccgacttcattgccgataaggtggattatctggacaccaaggcaccaggcgggtcaaatcaggaataagggcacattgccccggcgtgagtcggggcaatcccgcaaggagggtgaatgaatcggacgtttgaccggaaggcatacaggcaagaactgatcgacgcggggttttccgccgaggatgccgaaaccatcgcaagccgcaccgtcatgcgtgcgccccgcgaaaccttccagtccgtcggctcgatggtccagcaagctacggccaagatcgagcgcgacagcgtgcaactggctccccctgccctgcccgcgccatcggccgccgtggagcgttcgcgtcgtctcgaacaggaggcggcaggtttggcgaagtcgatgaccatcgacacgcgaggaactatgacgaccaagaagcgaaaaaccgccggcgaggacctggcaaaacaggtcagcgaggccaagcaggccgcgttgctgaaacacacgaagcagcagatcaaggaaatgcagctttccttgttcgatattgcgccgtggccggacacgatgcgagcgatgccaaacgacacggcccgctctgccctgttcaccacgcgcaacaagaaaatcccgcgcgaggcgctgcaaaacaaggtcattttccacgtcaacaaggacgtgaagatcacctacaccggcgtcgagctgcgggccgacgatgacgaactggtgtggcagcaggtgttggagtacgcgaagcgcacccctatcggcgagccgatcaccttcacgttctacgagctttgccaggacctgggctggtcgatcaatggccggtattacacgaaggccgaggaatgcctgtcgcgcctacaggcgacggcgatgggcttcacgtccgaccgcgttgggcacctggaatcggtgtcgctgctgcaccgcttccgcgtcctggaccgtggcaagaaaacgtcccgttgccaggtcctgatcgacgaggaaatcgtcgtgctgtttgctggcgaccactacacgaaattcatatgggagaagtaccgcaagctgtcgccgacggcccgacggatgttcgactatttcagctcgcaccgggagccgtacccgctcaagctggaaaccttccgcctcatgtgcggatcggattccacccgcgtgaagaagtggcgcgagcaggtcggcgaagcctgcgaagagttgcgaggcagcggcctggtggaacacgcctgggtcaatgatgacctggtgcattgcaaacgctagggccttgtggggtcagttccggctgggggttcagcagccagcgctttactggcatttcaggaacaagcgggcactgctcgacgcacttgcttcgctcagtatcgctcgggacgcacggcgcgctctacgaactgccgataaacagaggattaaaattgacaattgtgattaaggctcagattcgacggcttggagcggccgacgtgcaggatttccgcgagatccgattgtcggccctgaagaaagctccagagatgttcgggtccgtttacgagcacgaggagaaaaagcccatggaggcgttcgctgaacggttgcgagatgccgtggcattcggcgcctacatcgacggcgagatcattgggctgtcggtcttcaaacaggaggacggccccaaggacgctcacaaggcgcatctgtccggcgttttcgtggagcccgaacagcgaggccgaggggtcgccggtatgctgctgcgggcgttgccggcgggtttattgctcgtgatgatcgtccgacagattccaacgggaatctggtggatgcgcatcttcatcctcggcgcacttaatatttcgctattctggagcttgttgtttatttcggtctaccgcctgccgggcggggtcgcggcgacggtaggcgctgtgcagccgctgatggtcgtgttcatctctgccgctctgctaggtagcccgatacgattgatggcggtcctgggggctatttgcggaactgcgggcgtggcgctgttggtgttgacaccaaacgcagcgctagatcctgtcggcgtcgcagcgggcctggcgggggcggtttccatggcgttcggaaccgtgctgacccgcaagtggcaacctcccgtgcctctgctcacctttaccgcctggcaactggcggccggaggacttctgctcgttccagtagctttagtgtttgatccgccaatcccgatgcctacaggaaccaatgttctcggcctggcgtggctcggcctgatcggagcgggtttaacctacttcctttggttccgggggatctcgcgactcgaacctacagttgtttccttactgggctttctcagcccccgagcgcttagtgggaatttgtaccccttatcgaaccgggagcacaggatgacgcctaacaattcattcaagccgacaccgcttcgcggcgcggcttaattcaggagttaaacatcatgagggaagcggtgatcgccgaagtatcgactcaactatcagaggtagttggcgtcatcgagcgccatctcgaaccgacgttgctggccgtacatttgtacggctccgcagtggatggcggcctgaagccacacagtgatattgatttgctggttacggtgaccgtaaggcttgatgaaacaacgcggcgagctttgatcaacgaccttttggaaacttcggcttcccctggagagagcgagattctccgcgctgtagaagtcaccattgttgtgcacgacgacatcattccgtggcgttatccagctaagcgcgaactgcaatttggagaatggcagcgcaatgacattcttgcaggtatcttcgagccagccacgatcgacattgatctggctatcttgctgacaaaagcaagagaacatagcgttgccttggtaggtccagcggcggaggaactctttgatccggttcctgaacaggatctatttgaggcgctaaatgaaaccttaacgctatggaactcgccgcccgactgggctggcgatgagcgaaatgtagtgcttacgttgtcccgcatttggtacagcgcagtaaccggcaaaatcgcgccgaaggatgtcgctgccgactgggcaatggagcgcctgccggcccagtatcagcccgtcatacttgaagctaggcaggcttatcttggacaagaagatcgcttggcctcgcgcgcagatcagttggaagaatttgttcactacgtgaaaggcgagatcaccaaggtagtcggcaaataatgtctaacaattcgttcaagccgacgccgcttcgcggcgcggcttaactcaagcgttagagagctggggaagactatgcgcgatctgttgaaggtggttctaagcctcgtcttgcgatggcatttcgatccattcccattccgcgctcaagatggcttcccctcggcagttcatcagggctaaatcaatctagccgacttgtccggtgaaatgggctgcactccaacagaaacaatcaaacaaacatacacagcgacttattcacacgagctcaaattacaacggtatatatcctgccagtcagcatcatcacaccaaaagttaggcccgaatagtttgaaattagaaagctcgcaattgaggtctacaggccaaattcgctcttagccgtacaatattactcaccggatcctaaccggtttaattaaggcgcgccatgcccgggcaagcggccgcacaagtttgtacaaaaaagcaggcttctagacctaggtggagtcatcacgcagactatctcagcatgtgcgtagcacgcggccgcctcccagtatcattatagtgaaagttttggctctctcgccggtggttttttacctctatttaaaggggttttccacctaaaaattctggtatcattctcactttacttgttactttaatttctcataatctttggttgaaattatcacgcttccgcacacgatatccctacaaatttattatttgttaaacattttcaaaccgcataaaattttatgaagtcccgtctatctttaatgtagtctaacattttcatattgaaatatataatttacttaattttagcgttggtagaaagcataatgatttattcttattcttcttcatataaatgtttaatatacaatataaacaaattctttaccttaagaaggatttcccattttatattttaaaaatatatttatcaaatatttttcaaccacgtaaatctcataataataagttgtttcaaaagtaataaaatttaactccataatttttttattcgactgatcttaaagcaacacccagtgacacaactagccatttttttctttgaataaaaaaatccaattatcattgtattttttttatacaatgaaaatttcaccaaacaatgatttgtggtatttctgaagcaagtcatgttatgcaaaattctataattcccatttgacactacggaagtaactgaagatctgcttttacatgcgagacacatcttctaaagtaattttaataatagttactatattcaagatttcatatatcaaatactcaatattacttctaaaaaattaattagatataattaaaatattacttttttaattttaagtttaattgttgaatttgtgactattgatttattattctactatgtttaaattgttttatagatagtttaaagtaaatataagtaatgtagtagagtgttagagtgttaccctaaaccataaactataagatttatggtggactaattttcatatatttcttattgcttttaccttttcttggtatgtaagtccgtaactggaattactgtgggttgccatgacactctgtggtcttttggttcatgcatggatcttgcgcaagaaaaagacaaagaacaaagaaaaaagacaaaacagagagacaaaacgcaatcacacaaccaactcaaattagtcactggctgatcaagatcgccgcgtccatgtatgtctaaatgccatgcaaagcaacacgtgcttaacatgcactttaaatggctcacccatctcaacccacacacaaacacattgcctttttcttcatcatcaccacaaccacctgtatatattcattctcttccgccacctcaatttcttcacttcaacacacgtcaacctgcatatgcgtgtcatcccatgcccaaatctccatgcatgttccaaccaccttctctcttatataatacctataaatacctctaatatcactcacttctttcatcatccatccatccagagtactactactctactactataataccccaacccaactcatattcaatactactctaggatccacaaccaaaaatggcagcgaggctgcaagagcagaaaggaggtgagatggacacgaggattgcgatcataggcatgagcgccatacttccttgtggaaccacggtgagagagtcatgggagaccataagggctggcattgattgcctgtctgatcttcctgaggatcgtgttgatgtgactgcgtactttgacccagtcaagaccacaaaggacaaaatctactgcaagagaggaggtttcattcctgagtatgactttgatgcgcgtgagtttggtctcaacatgttccagatggaagattctgatgcgaatcagaccatctcacttctcaaggtcaaagaagcacttcaagatgctgggattgatgcacttggaaaggagaagaaaaacataggatgcgtgcttggcattggaggtggacagaagagttcacatgagttctacagcagactcaactatgtggttgtggagaaagtcttgagaaagatggggatgccagaggaagatgtcaaagtggctgtggagaagtacaaagcgaacttcccagaatggagacttgactctttccctggattccttgggaatgtcactgctggcagatgcaccaacacattcaacttggatggcatgaactgcgttgtggatgctgcatgtgcaagctccttgatagcagtcaaggttgcgattgatgaactgctctatggtgactgcgacatgatggtcactggtgcaacctgcacagacaactccattgggatgtacatggctttctcaaagacacctgtgttcagcacggacccaagtgtgagagcgtatgatgagaaaacgaaagggatgctcattggtgagggatcagccatgttggtgctcaaacgttatgcagatgcagtgagggatggtgatgagattcatgctgtgattcgtggttgtgcaagctcaagtgatggcaaagcagctggcatctacactcccacaatcagtggtcaagaggaagccttgagacgtgcatacaatcgtgcctgcgttgaccctgccactgtcactttggttgagggtcatgggactggcactccagttggagataggattgagttgactgcgttgaggaacttgtttgacaaagcgtatggtgaagggaacacagagaaagttgcagttggaagtatcaagtccagtattggtcatttgaaggctgttgctggtcttgctggaatgatcaaggtcatcatggctctcaaacacaagactttgcctggaacgatcaatgtggacaatccacccaatctctatgacaacactcccatcaatgagtcatccctctacatcaacacgatgaacagaccctggttccctccacctggtgttccgagacgtgctggaatatccagctttggctttggaggtgccaactaccatgcagtgttggaagaggctgaaccagagcacacgacagcgtacagactcaacaaacgtccacaaccggtgttgatgatggctgcaactcctgctgcgttgcagagcctttgtgaagctcagctgaaagagtttgaagctgcgatcaaggagaatgagacagtcaagaatactgcctacatcaagtgtgtcaagtttggagaacagttcaagttccctgggagcatacctgcgaccaatgcgagactgggattcttggtcaaagatgcggaggatgcgtgctccacgcttcgtgctatatgtgctcagtttgccaaagatgtgaccaaagaagcgtggaggcttccgagagaaggagtttctttccgtgccaaaggcattgccaccaatggtgctgttgctgcactcttctctggacaaggtgctcagtacacacacatgttcagtgaagttgcgatgaactggcctcagttcagacagtccattgctgcaatggacgctgcacagtccaaggttgctggaagtgacaaagactttgaaagagtctctcaagtcctgtacccaaggaaaccgtacgaacgtgagccagaacaagatcacaagaaaatctcactcacagcatacagccagccgtcaaccctggcatgtgctcttggtgcctttgagattttcaaggaagctggattcactccagactttgcagctggacacagcttgggtgagtttgctgcgctctatgcagctggttgtgttgacagagatgagttgtttgaacttgtttgcagaagggcaaggatcatgggaggcaaagatgcacctgccacacccaaaggttgcatggcagctgtcataggacccaacgcagagaacatcaaggttcaagctgccaacgtctggcttggaaactcaaactctccgtctcagactgtcattactgggtctgttgaagggattcaagctgaaagtgccagattgcagaaggaagggttcagagttgtgcctcttgcttgtgagtctgccttccattctccacagatggaaaatgccagctcagctttcaaagatgtcatatccaaggtttccttccgtacacccaaagcagaaacaaagctcttcagcaatgtttctggagagacctatccgacggatgccagagagatgctcactcaacacatgacctcatctgtgaagttcctgacccaagtgaggaacatgcaccaagctggtgcgagaatctttgttgagtttggaccgaaacaagttctcagcaaacttgtttctgaaaccctcaaagatgacccgtctgttgtcacagtgtctgtgaacccagcttctggcacggactctgacatacagttgagggatgctgcagttcagctggttgtggctggtgtcaatcttcaagggtttgacaagtgggatgctcctgatgccacgaggatgcaagccatcaagaaaaagagaaccacactcagactttcagctgccacctatgtcagtgacaagaccaagaaagtgagggatgctgccatgaacgacggaagatgtgtcacatacctcaagggtgctgcaccactcatcaaggctcctgaacctgtggttgacgaagctgccaagagggaggctgaaaggcttcagaaggagcttcaagacgctcagaggcagcttgacgacgccaaacgtgcagctgcagaagccaactccaaacttgctgctgccaaggaggaagccaagactgctgcagcttcagccaagcctgcagttgacactgctgttgtggagaaacatcgtgccatcctcaagtccatgctggctgagctggatggttatggaagtgttgatgcttcttcccttcagcaacagcaacagcaacagactgctccggcgcctgttaaagccgctgcccctgccgctcccgttgcaagtgctcctgctcccgccgtgtccaacgagttgcttgagaaagctgagacagttgtgatggaggttctcgctgccaagactggatacgaaacagacatgattgaggcggacatggagcttgagactgagttgggaattgacagcatcaagagggttgaaattctttctgaagtccaagctatgcttaacgttgaggcgaaagatgttgatgctctctctaggacgagaacagtgggtgaagttgtcaacgctatgaaggcagaaatcgctggttcttccgctccggcgccggcagctgccgcacctgcaccggctaaagcggctccagctgcagctgcaccagctgtttctaatgagctgctcgaaaaggcagaaactgttgtgatggaagtccttgctgccaaaactggctacgaaactgacatgatagaatcagacatggagcttgagacggagcttggaattgattccatcaagcgtgtggaaatcctcagtgaagtccaagccatgctcaatgtggaagctaaggatgtggatgctctctcaaggaccagaactgtcggtgaggttgtcaatgccatgaaggctgagatagctggaggctccgctcctgcgccggccgctgccgctcctggtcccgctgccgcggctccagctccagctgcagccgctccggccgtctcaaacgaactccttgaaaaagctgagaccgtcgtgatggaggtcttggcagctaaaaccggctatgagactgacatgattgagtctgacatggaattggagacagaacttgggatagacagcatcaaacgtgttgaaatcctcagtgaggtccaagctatgctgaacgtggaagcgaaggatgttgatgctctgtccagaacgaggaccgttggtgaggttgtggatgccatgaaggctgaaattgctggagggtctgcgcccgcgccagctgcagccgctcctgcacccgcagccgcggcacctgctccagctgcacctgcacctgccgtttcttcagaactcttggagaaggctgagacggttgtgatggaggttttggctgcaaagactggctatgagaccgacatgattgaatctgatatggaattggagacagagcttgggatcgattccatcaaaagagtggagatcctgagtgaagtccaagccatgctcaatgttgaagctaaggatgttgatgcactttcaagaacaaggacagtgggtgaggttgtggatgccatgaaggcggagattgctggagggagcgcgcctgcgccagctgccgcggcacctgcaccggcagccgcagctccagctccagctgcaccagcaccggccgcgcccgcgccagctgtttcatccgaactcctggaaaaggccgagacggttgtgatggaggtgctcgcagctaagactggttacgagaccgacatgattgaaagtgacatggagcttgaaaccgagttgggaatagatagcatcaaacgtgttgaaatcttgtctgaggtccaagctatgttgaacgtggaggcaaaagatgtcgatgcgctttcaagaaccagaacagtcggtgaggtcgtggacgccatgaaggctgaaattgccggaagctctgctagtgcgccagctgcagccgcacctgcacctgctgccgcggcacctgctccagctgcagccgctcctgccgtcagcaatgagttgctggagaaagccgaaacagttgtgatggaagtccttgctgcaaaaactggttacgaaacggacatgattgagtcagacatggaattggagaccgaacttggaatagattccatcaagagagtggagatcctctctgaggtgcaagccatgctcaacgttgaggctaaagatgttgatgcactcagtaggacaagaactgtgggggaagttgtcgatgcgatgaaggctgagattgctggaggctctgctcctgcgccggcagctgccgcacctgcacccgcagccgcggcaccagctgtcagcaacgaattgcttgagaaggctgaaacagttgtcatggaagtgctggctgcaaaaaccggctatgagactgacatgattgagtctgacatggaacttgagacggaattgggcattgacagcatcaagcgtgttgagatcctcagtgaagtccaagcaatgctcaatgtggaggctaaggatgtggatgccctctcaaggaccagaacagttggtgaggtcgttgatgcgatgaaggcggagatcgctggaagttccgcgcctgcgccagctgcagccgctcctgcacccgcagccgcggcaccggctccagctgcagccgcaccggccgtctcctcagaactcctggaaaaggctgagacagttgtgatggaagtccttgctgcgaaaactggctatgagaccgacatgattgaatctgacatggaactggagaccgagcttggaattgactccatcaaacgtgttgaaatcctctctgaggttcaagcgatgttgaatgtggaggccaaagatgttgatgctctttccagaacaaggacggtgggagaggtggttgatgccatgaaggctgagatagctgggggttctgctcctgcgccagctgcagccgctcctgctcccgctgccgcggcaccagctgtcagcaacgaactccttgaaaaagctgaaactgttgtgatggaggttttggctgcaaagactggatacgagactgacatgatagagtcagacatggagttggaaacagagcttgggattgatagcatcaagcgtgtggaaatcctttctgaggttcaagccatgctgaacgttgaggccaaagatgtcgatgctttgtcaaggaccagaacggttggagaagtggtcgatgccatgaaggctgagatagctggtggatcagcccctgctccggctgcagccgctcctgcaagtgccggtgctgcaccagctgtgaagattgattcagttcatggtgctgactgtgacgatttgtcactgatgcacgcaaaggtggttgacatcagaaggccagatgaactgattctggaaagaccggagaaccgtccagttcttgtcgttgacgatggctcagagttgacacttgctcttgtgagggtgttgggagcctgtgcagttgtcttgacctttgagggattgcagttggctcagagagctggtgcagctgccattcgtcatgttctggctaaggacctttcagcagaatcagctgagaaggccatcaaagaggctgagcaaagatttggagcgttgggaggcttcataagccagcaagcagaaaggtttgaaccagctgagatactgggtttcacactcatgtgtgcgaagtttgccaaagcctctctctgcactgctgtggctggaggtcgtcctgccttcatcggtgtggctaggcttgacggcagacttggattcacctctcaaggcacttctgacgcactcaagagagcacagcgtggagcgatctttggactctgcaagacaatagggttggagtggtcagaatctgatgtgttcagccgtggtgtggacattgctcaagggatgcacccagaagatgctgcagttgccatagttagggagatggcgtgtgctgacatcagaatcagagaggttgggattggagcaaaccagcaaagatgcacaatcagagctgccaagttggagactgggaaccctcagagacagatagcgaaagacgatgtgcttctggtttctggaggtgctcgtgggatcacacctctttgcatccgtgagatcacgcgtcagattgctggaggcaagtacattctgttgggtcgtagcaaagtttctgcgtctgaaccagcatggtgtgctggcatcactgatgagaaggctgtgcagaaagctgccacccaagagttgaagagggccttcagtgctggtgaaggacccaaacccactccaagggctgtcacgaaacttgtgggatctgttcttggtgctcgtgaagtgagaagctccattgctgccattgaagctctgggtggcaaagcgatctacagctcttgtgatgtgaactctgctgcagatgttgccaaagcagttagggatgcagagtcccagcttggtgccagagttagtggaatcgttcacgcttctggtgtgctccgtgatcgtctcatagagaagaaactccctgacgagtttgatgctgtctttgggaccaaagtcactgggttggagaatcttctggctgcagttgatcgtgccaacctcaaacacatggttctcttcagctcccttgctggtttccacggcaatgttggtcagtctgactatgcgatggcaaacgaagctctcaacaagatgggtttggaacttgcgaaggatgtcagtgtcaagtccatctgctttggtccctgggatggtgggatggtgacacctcaactcaagaaacagtttcaagaaatgggagttcagatcattcctcgtgaaggaggtgctgatacagttgcgaggattgtgttgggatcaagtcctgctgagatccttgttggaaactggaggacaccatccaagaaagttggaagtgacacgatcaccctgcatagaaagatcagtgccaagtccaatcccttcttggaggatcatgtcatacaaggcagaagggtgttgccaatgacccttgctattgggagccttgctgagacctgccttggactcttccctggctactctctctgggccatagatgacgcacagctcttcaaaggtgtcactgttgatggagacgtcaactgtgaagtgaccctcacaccgtccactgctccgagtgggagggtgaatgtccaagcgacgctcaagacgttctcaagtggaaaacttgttccagcctacagagctgtcatagtgttgtccaaccaaggtgctccacctgccaatgcaaccatgcagcctccgagccttgatgcagatcctgctttgcaagggtcagtctatgatggcaagactctctttcatggtcctgcgttcagaggcattgatgacgttctcagctgcaccaagagccagcttgttgccaagtgttctgctgttcctggatcagatgcagccagaggagagtttgcaactgacactgatgcacatgatccctttgtcaatgatcttgcctttcaagcaatgttggtctgggtgaggagaacgctgggacaagctgcactcccgaactccattcagaggatagtccaacacagaccggtcccacaagacaaacccttctacatcaccctcagatccaatcagagtggtggacatagccagcacaaacatgcacttcagttccacaacgaacaaggtgatctcttcattgatgttcaagcctctgtcattgcgacagactcacttgcgttctgagtagttagcttaatcacttaggtcacctcgagtatcaaaatctatttagaaatacacaatattttgttgcaggcttgctggagaatcgatctgctatcataaaaattacaaaaaaattttatttgcctcaattattttaggattggtattaaggacgcttaaattatttgtcgggtcactacgcatcattgtgattgagaagatcagcgatacgaaatattcgtagtactatcgataatttatttgaaaattcataagaaaagcaaacgttacatgaattgatgaaacaatacaaagacagataaagccacgcacatttaggatattggccgagattactgaatattgagtaagatcacggaatttctgacaggagcatgtcttcaattcagcccaaatggcagttgaaatactcaaaccgccccatatgcaggagcggatcattcattgtttgtttggttgcctttgccaacatgggagtccaaggttggcgcgccgaattcgcggccgcttaattaagatgagtgatactcaggactcaggactcactctgctgatcactagtgctagcctcgaggtcgacacaactttgtatacaaaagttgtctagacctaggctcagcaactcatccagtcaagttcgagtcagtgagttgggcggccgcctcccagtatcattatagtgaaagttttggctctctcgccggtggttttttacctctatttaaaggggttttccacctaaaaattctggtatcattctcactttacttgttactttaatttctcataatctttggttgaaattatcacgcttccgcacacgatatccctacaaatttattatttgttaaacattttcaaaccgcataaaattttatgaagtcccgtctatctttaatgtagtctaacattttcatattgaaatatataatttacttaattttagcgttggtagaaagcataatgatttattcttattcttcttcatataaatgtttaatatacaatataaacaaattctttaccttaagaaggatttcccattttatattttaaaaatatatttatcaaatatttttcaaccacgtaaatctcataataataagttgtttcaaaagtaataaaatttaactccataatttttttattcgactgatcttaaagcaacacccagtgacacaactagccatttttttctttgaataaaaaaatccaattatcattgtattttttttatacaatgaaaatttcaccaaacaatgatttgtggtatttctgaagcaagtcatgttatgcaaaattctataattcccatttgacactacggaagtaactgaagatctgcttttacatgcgagacacatcttctaaagtaattttaataatagttactatattcaagatttcatatatcaaatactcaatattacttctaaaaaattaattagatataattaaaatattacttttttaattttaagtttaattgttgaatttgtgactattgatttattattctactatgtttaaattgttttatagatagtttaaagtaaatataagtaatgtagtagagtgttagagtgttaccctaaaccataaactataagatttatggtggactaattttcatatatttcttattgcttttaccttttcttggtatgtaagtccgtaactggaattactgtgggttgccatgacactctgtggtcttttggttcatgcatggatcttgcgcaagaaaaagacaaagaacaaagaaaaaagacaaaacagagagacaaaacgcaatcacacaaccaactcaaattagtcactggctgatcaagatcgccgcgtccatgtatgtctaaatgccatgcaaagcaacacgtgcttaacatgcactttaaatggctcacccatctcaacccacacacaaacacattgcctttttcttcatcatcaccacaaccacctgtatatattcattctcttccgccacctcaatttcttcacttcaacacacgtcaacctgcatatgcgtgtcatcccatgcccaaatctccatgcatgttccaaccaccttctctcttatataatacctataaatacctctaatatcactcacttctttcatcatccatccatccagagtactactactctactactataataccccaacccaactcatattcaatactactctaggatccacaaccaaaaatggctgcaaggaacgtgagtgcggctcatgagatgcatgacgagaagaggatagctgttgtgggcatggctgttcagtatgctggatgcaaaacgaaagacgagttctgggaagttctcatgaatggaaaagttgagagcaaagtgatcagcgacaaacgtcttggttcaaattaccgtgctgaacactacaaagctgaaaggagcaagtatgctgacaccttctgcaatgagacatatggaactcttgatgagaacgaaatagacaatgagcatgaactccttttgaaccttgccaaacaagccttggctgaaacatctgtcaaagattcaacaagatgtggcatagtttctggatgcctcagcttcccgatggacaacctccaaggtgaactcttgaatgtgtaccagaaccatgttgagaagaaacttggtgccagagttttcaaagatgcctctcactggtcagaaagagaacagtccaacaaaccagaggctggtgacagaagaatcttcatggaccctgcttcctttgttgctgaggaactcaatcttggcgctctccactactctgttgatgctgcctgtgccactgcgctctatgtgctcagactggcgcaagatcacttggtctctggtgcagctgatgtgatgctttgtggtgcaacatgcctgccggagccgtttttcatactctctgggttctcaaccttccaagccatgcctgttggaacgggtcagaatgtgtccatgccgctgcacaaagattctcaaggattgacccctggtgaaggaggttccatcatggtcctcaaacgtttggatgacgcaatcagagatggagatcacatctatggaacacttttgggagccaatgtcagcaacagtggcactggtctgccacttaaaccccttttgccgtcagagaaaaagtgcctcatggacacctacacacgtatcaatgtgcatccccacaagattcagtatgttgaatgccatgcaactgggactccacaaggtgatcgtgtggaaattgatgctgtgaaggcttgctttgaaggcaaagtcccacgttttggaaccacaaaagggaactttggacacacattggtggcagctgggtttgctggcatgtgcaaagtgcttctctccatgaagcacgggatcattccacccactccgggaatagatgacgaaacgaagatggaccctctggttgtctctggtgaggccattccctggccagaaacgaatggagaaccgaagcgtgctggtctctcagcgtttggatttggtgggaccaatgctcatgctgtctttgaggaacatgacccaagcaatgctgcatgcactggccatgactccatttctgctctctctgcacgttgtggtggtgagtcaaacatgagaatagcaatcactgggatggatgccacttttggtgctttgaaaggattggatgcttttgaaagggccatctacactggtgctcatggtgctataccactcccagaaaagagatggagattcctggggaaagacaaggacttccttgatctttgtggagtcaaagcaacaccgcatggctgttacattgaagatgttgaagttgatttccagaggctgaggactccaatgactcctgaagatatgctcttgcctcaacagcttctggctgtcaccacaattgatagggccatattggactctggcatgaagaaaggtggaaatgtggctgtctttgtggggttggggaccgatcttgaactctaccgtcaccgtgcaagggttgctctcaaggagagagtgaggcctgaagccagcaagaaactcaatgacatgatgcagtacatcaatgattgtgggacaagcacttcttacaccagctacataggcaacttggttgcaacaagggtcagttcacaatggggcttcacgggaccttccttcacaatcacagaaggcaacaattctgtgtacagatgtgctgaacttggcaaatacctcttggaaacgggagaggttgatggggttgtggttgcgggtgttgatctctgtgggagtgctgagaacctttacgtcaagtcaaggcgtttcaaggtgtctacatctgacaccccgagagccagctttgatgcagctgctgatggttactttgttggagagggctgtggtgcatttgtgctcaagcgtgagacaagctgcaccaaggatgacagaatctatgcttgcatggatgccatagttcctggaaatgttccatctgcatgtttgagagaggcattggatcaagccagagtcaagcctggagacatcgagatgttggagctttctgctgattcagcgaggcatttgaaggacccgtctgttctcccaaaggaactcactgctgaggaagagattggcggacttcagacgattcttcgtgacgatgacaagctcccaaggaatgttgcaactggaagtgtcaaggccactgttggtgacactggttatgcttctggtgctgccagtttgattaaggctgcgctttgcatctacaaccgttacctgcccagcaatggagatgactgggatgaacctgcacctgaagcaccctgggacagcacactctttgcgtgccagacctcaagagcttggttgaagaaccctggtgagagacgttatgcggctgtttccggagtcagtgaaaccagaagttgctacagtgtgctgctttctgaagcagagggacactacgagagagagaacagaatcagtttggatgaggaagcacccaagctcattgtgttgagagcagactcccatgaagagattcttggaagattggacaagataagggaaaggttcttgcagcccacgggtgctgcacccagagagtctgaattgaaggcgcaagcccgtaggatctttcttgaactccttggtgagacccttgcccaagatgcagcttcatctggaagtcagaagccccttgctctcagcttggtctccactccatccaagctccagagagaggtggaacttgcggcaaaaggcattccgagatgtctcaagatgagacgtgattggagttcccctgctggaagcagatatgcgcctgagcctttggccagtgacagagttgccttcatgtatggagaaggaaggagcccttactatggcatcacacaagacattcataggatttggcctgaacttcatgaggtcatcaatgagaaaacaaaccgtctctgggctgaaggtgacagatgggtcatgccaagggccagcttcaagagtgagcttgagtcacaacagcaagagtttgacagaaacatgattgaaatgttccgtcttggaatcctcacctcaattgccttcacaaacctggcgagagatgttctcaacatcacgcccaaagcagcctttggactcagtttgggagagatttccatgatctttgctttctccaagaaaaacggtttgataagcgatcagttgacaaaggatttgagagagtcagatgtctggaacaaagctctggctgttgagttcaatgcgctcagagaagcctggggcattccacagtctgtcccaaaagatgagttctggcaaggttacatagtgaggggaacgaaacaagacatagaagcagccatagcaccagactcaaagtatgtgaggttgaccatcatcaatgatgccaacactgctctcatcagtggaaagcctgatgcatgcaaagctgcgattgctcgtcttggtggcaacatccctgcgcttccagtcactcaaggcatgtgtgggcattgcccagaggtgggaccttacaccaaggacatcgcaaagatccacgccaaccttgagttccctgtggttgatggtcttgatctctggactaccataaaccagaagaggcttgtgccaagagccacgggtgccaaagatgaatgggctccttcatcctttggggagtatgctggacagctctatgagaaacaagccaacttccctcagatagttgaaaccatctacaagcagaactatgatgtgtttgttgaagttgggccaaacaatcacagaagcacagcagtgagaaccacgcttggaccacagagaaaccaccttgctggtgccatagacaagcagaacgaggatgcttggacgacaatagtcaagctcgtggcttcattgaaggctcaccttgttcctggagtgaccatcagtccgctctaccactccaagctcgttgcagaggctgaggcttgttatgctgcgctctgtaaaggtgagaaacccaagaaaaacaagtttgtgagaaagattcagttgaatggcagattcaacagcaaggcagaccccatctcctcagcagaccttgcatccttcccacctgcggaccctgcgattgaagctgccatctcttcaaggatcatgaagcctgtggctccgaaattctatgcgcgtctcaacattgatgagcaagatgagaccagagatccgatcttgaacaaggacaatgcgccttccagctccagctcttccagcagttcctcttccagcagttcatctccgtctcctgctccttcagctccagttcagaagaaagctgccccagctgcggagacaaaagctgttgccagtgctgatgcacttcgtagtgccctgcttgatcttgactccatgcttgcgctcagctctgcaagtgcttctggcaaccttgttgagactgcgccatctgatgccagtgtcattgtccctccgtgcaacattgctgatcttggcagcagagctttcatgaaaacttatggtgtttctgcgcctctgtacaccggtgcaatggccaagggaattgcctctgcggacttggtgatcgcagctggaaggcaaggaatccttgcgtcatttggtgctggaggccttccaatgcaagttgtgcgtgagtccattgaaaagattcaagctgccctgcccaatggaccatatgctgtcaacctcatccattctccttttgacagcaaccttgagaagggaaatgttgatctcttcttggaaaagggtgtcacttttgttgaggcttcagccttcatgacgttgacaccgcaagttgtcagatacagagcggctgggttgacgaggaatgcagatgggtcagtcaacataaggaacagaatcattgggaaagtctccagaactgagctggctgaaatgttcatgcgtcctgcacctgagcatcttttgcagaagctcattgcttctggggagatcaatcaagaacaagctgagttggccagacgtgttcctgtggctgatgacattgcggttgaagctgattctggtggacacactgacaaccgtccaatccatgtcattctgcctctgattatcaacctgagggataggcttcacagagagtgtggatacccagcaaacctgagggttcgtgttggtgctgggggtggcattgggtgtccccaagctgcgctggcaactttcaacatgggtgcctctttcattgtcactggaacagtgaaccaagttgccaaacaatctgggacgtgtgacaatgtgaggaaacagcttgcgaaagcaacttactcagatgtttgcatggcaccggcagctgacatgtttgaggaaggtgtgaaacttcaagttttgaagaaaggaacaatgttcccttcaagagccaacaaactctatgagttgttctgcaagtatgattcttttgagtccatgcctccagcagagcttgcgagggttgagaaaagaatcttcagtcgtgcattggaagaggtctgggatgagaccaagaacttctacatcaaccgtctccacaacccagagaagatacagagggctgagagggaccccaaactgaagatgtcactgtgtttcagatggtatctgtccctggcttcaaggtgggccaacactggagcttctgacagagtcatggactaccaagtttggtgtggtcctgccattggttcattcaatgatttcatcaaaggaacttaccttgatccggcagtggcaaatgagtacccgtgtgttgtgcagatcaacaaacagattcttagaggagcgtgcttcttgaggcgtcttgaaatactgagaaatgcaaggctttcagatggtgcagctgcacttgtggcgagcattgatgacacatatgtccctgctgagaagctgtgagtagttagcttaatcacttaggtcacctcgagtatcaaaatctatttagaaatacacaatattttgttgcaggcttgctggagaatcgatctgctatcataaaaattacaaaaaaattttatttgcctcaattattttaggattggtattaaggacgcttaaattatttgtcgggtcactacgcatcattgtgattgagaagatcagcgatacgaaatattcgtagtactatcgataatttatttgaaaattcataagaaaagcaaacgttacatgaattgatgaaacaatacaaagacagataaagccacgcacatttaggatattggccgagattactgaatattgagtaagatcacggaatttctgacaggagcatgtcttcaattcagcccaaatggcagttgaaatactcaaaccgccccatatgcaggagcggatcattcattgtttgtttggttgcctttgccaacatgggagtccaaggttggcgcgccgaattcgcggccgcttaattaatctgacctgaccactagacctgagtgagtacagatgtgctactagtgctagcctcgaggtcgaccaacttttctatacaaagttgtctagacctaggactaggcactgagtgactcactgacctgactgagtgactggcggccgcctcccagtatcattatagtgaaagttttggctctctcgccggtggttttttacctctatttaaaggggttttccacctaaaaattctggtatcattctcactttacttgttactttaatttctcataatctttggttgaaattatcacgcttccgcacacgatatccctacaaatttattatttgttaaacattttcaaaccgcataaaattttatgaagtcccgtctatctttaatgtagtctaacattttcatattgaaatatataatttacttaattttagcgttggtagaaagcataatgatttattcttattcttcttcatataaatgtttaatatacaatataaacaaattctttaccttaagaaggatttcccattttatattttaaaaatatatttatcaaatatttttcaaccacgtaaatctcataataataagttgtttcaaaagtaataaaatttaactccataatttttttattcgactgatcttaaagcaacacccagtgacacaactagccatttttttctttgaataaaaaaatccaattatcattgtattttttttatacaatgaaaatttcaccaaacaatgatttgtggtatttctgaagcaagtcatgttatgcaaaattctataattcccatttgacactacggaagtaactgaagatctgcttttacatgcgagacacatcttctaaagtaattttaataatagttactatattcaagatttcatatatcaaatactcaatattacttctaaaaaattaattagatataattaaaatattacttttttaattttaagtttaattgttgaatttgtgactattgatttattattctactatgtttaaattgttttatagatagtttaaagtaaatataagtaatgtagtagagtgttagagtgttaccctaaaccataaactataagatttatggtggactaattttcatatatttcttattgcttttaccttttcttggtatgtaagtccgtaactggaattactgtgggttgccatgacactctgtggtcttttggttcatgcatggatcttgcgcaagaaaaagacaaagaacaaagaaaaaagacaaaacagagagacaaaacgcaatcacacaaccaactcaaattagtcactggctgatcaagatcgccgcgtccatgtatgtctaaatgccatgcaaagcaacacgtgcttaacatgcactttaaatggctcacccatctcaacccacacacaaacacattgcctttttcttcatcatcaccacaaccacctgtatatattcattctcttccgccacctcaatttcttcacttcaacacacgtcaacctgcatatgcgtgtcatcccatgcccaaatctccatgcatgttccaaccaccttctctcttatataatacctataaatacctctaatatcactcacttctttcatcatccatccatccagagtactactactctactactataataccccaacccaactcatattcaatactactctaggatccacaaccaaaaatggcgcttcgtgtcaagaccaacaagaagccatgttgggagatgaccaaggaggaactgacctctggcaaaactgaggtgttcaactatgaggaactcctggagtttgcagagggtgacatagctaaggtttttggtccggagtttgctgtcatagacaagtaccccagaagggtgaggctgcctgctcgtgaatacctgcttgtgacaagggtcacactcatggatgccgaggtcaacaactacagagttggtgccagaatggtcactgagtatgatcttccagtgaatggcgaattgtctgagggaggtgattgtccctgggcagttctggttgagagtggacagtgcgatttgatgctgatatcatacatgggaattgatttccagaaccaaggtgacagagtttaccgtctgctcaacaccacgttgacattctatggggttgcccatgagggagagacccttgagtatgacatcagagtgaccggttttgccaaacgtttggatggtggcatctccatgttcttctttgagtatgactgctatgtcaatgggaggcttctcattgagatgagagatggctgtgctggcttcttcacaaatgaggagcttgatgcgggaaagggtgtggtgttcacaagaggggatttggctgccagagctaagattccaaagcaagatgtttctccctatgctgtcgctccctgccttcacaaaacaaaactcaacgaaaaggagatgcagaccttggttgacaaagattgggcttccgtttttggctcaaagaatggcatgccggagatcaactacaaactctgcgcacgtaagatgctcatgattgatagagtcaccagcattgaccataagggaggtgtgtacggtttgggtcagttggttggtgagaaaatcttggagagggaccattggtacttcccatgccattttgttaaggatcaagtcatggctggatctcttgtcagcgacggttgttcacaaatgctcaagatgtacatgatctggctcggtttgcaccttaccaccggaccatttgacttcagacccgtcaacggacacccgaacaaagttaggtgtaggggtcagatatctcctcataagggaaagttggtctacgtcatggagatcaaagagatgggattcgacgaggataacgatccgtacgccattgctgacgtcaacatcattgacgttgatttcgaaaagggtcaagatttcagccttgatagaatcagcgactacggaaagggggatcttaacaaaaagatcgtcgtggacttcaagggcattgctctcaagatgcagaagagatccacgaacaagaacccctccaaagttcagcccgtttttgctaacggtgcagccactgtgggaccggaagcgtccaaggccagctctggtgccagtgctagtgcttctgctgcccctgcgaagcctgctttctcagcagatgttcttgcgccaaagccagttgcacttcctgaacatatcctcaagggtgacgctctcgctccgaaagaaatgtcctggcatcccatgtcaaaacttcctggcaacccgacgccgttcttctcccctagttcttaccctccgagggcaatttgcttcatccctttccctggcaacccacttgacaacaattgcaaagctggagaaatgcctctgaactggtacaacatgtcagagttcatgtgtggaaaagttagcaactgcttgggaccagagttcgcaagatttgataagtcaaatacgagcagaagccctgcttttgatttggctcttgtgactagagttgttgaagtcacaaacatggaacatggcaagttcctgaatgttgattgcaatcccagcaaaggcacaatggtgggggagtttgactgtcctcaagatgcgtggttctttgatggttcttgcaatgatgggcacatgccttattccatcatcatggaaatcggacttcagacatccggtgttctcaccagtgtgttgaaagcaccactgacgatggacaaagatgacattctctttaggaaccttgatgcaagtgctgaaatggtgaggccagatgtggatgtgagggggaaaaccataaggaatgtgaccaagtgcactggatatgcaatgttgggaaagatggggattcacagattcacgtttgagttgtctgttgatggcgtggttttctacaaaggaagcacttcctttggatggttcactccagaggtgtttgctcagcaagctggacttgacaatgggaaaaagacggagccttggtgcaaaactaacaacacgagtgtgagaagagttgaaatcgcatcagccaaaggcaaagaacagctgactgagaaacttccagatgcaactaatgctcaagttctcagaaggtcagaacagtgtgagtatttggattacctcaacattgctcctgattctgggctgcatgggaaaggatatgcgcatggacacaaagatgttaacccacaagactggttcttctcttgtcacttttggtttgatcctgtgatgcctggatctttgggaattgagtcaatgttccagctcattgaggcatttgcggtggaccagaacataccgggagaatacaatgtgagcaatccgacctttgcccatgcccctggaaaaacggcgtggaagtaccgtggtcaattgacaccaaagaaccgtgcgatggactgtgaggtgcacatagtttcaatcacagcctctcctgaaaatggaggctacgttgacatagtggcagatggagcactttgggttgatggtctccgtgtgtatgaagccaaagaactcagagttcgtgttgtcagtgcaaaacctcaagccattccggatgttcaacaacagccacccagcgcaaaagcggaccctgggaaaactggagttgcactcagtccgactcagttgagagatgtcctgcttgaagtggacaatccattgtatcttggtgttgaaaactccaatttggtgcagtttgaatccaaacctgcaacttcttcaaggattgtcagtatcaaaccatgctccataagtgatcttggtgacaagtccttcatggaaacgtacaatgtgtcagcacctctgtacactggagcaatggccaagggaattgcgtctgcggaccttgtcattgctgctgggaagaggaagatattgggttcttttggagcgggtgggcttccaatgcaccatgtgagggcagctttggagaagatacaagcggctctgcctcaaggaccatatgctgtgaacctcattcattcaccttttgacagcaacttggaaaaggggaatgttgatctcttcctcgaaaagggcgttactgtggtggaggcttctgcattcatgaccctcactccccaagttgttcgttaccgtgcagccggactctcaaggaacgctgatgggagtgtcaacatcagaaaccgtatcattggaaaagtgtccagaacagaactcgccgaaatgttcatcagaccggctccggaacacctccttgagaaactcatagcttctggtgagataacacaagaacaagccgaacttgcccgtcgtgttcctgtcgcagacgacatcgctgttgaagctgattctggtggtcacactgacaaccgtcccatccacgtcatcttgcctttgatcatcaaccttaggaacagactgcacagagagtgtggttatcctgcgcaccttagagtcagagttggagctggaggcggtgttggctgcccacaagctgctgcggctgccctcacaatgggagctgccttcatagtgactgggactgtcaatcaagttgctaaacagtccgggacatgtgacaacgtgagaaaacaactcagtcaagccacctacagtgacatttgcatggctccagcagctgatatgtttgaggaaggtgtgaaactccaagttctcaagaagggaacaatgttcccatcaagagctaacaaattgtacgaactcttttgcaagtacgactctttcgattcaatgcctcctgctgaacttgaaaggatcgagaagaggatcttcaagagggcacttcaagaggtctgggaagagaccaaggacttttacatcaatggtttgaagaatccagagaagatacagagagcggaacatgaccccaaactcaagatgtctttgtgtttcagatggtatcttggtcttgcatcacgttgggccaacatgggtgctcctgatcgtgtcatggactatcaagtctggtgtggtccagccattggagccttcaatgacttcatcaaaggaacatatcttgatcctgctgtctctaatgagtacccatgtgttgtccagatcaaccttcagattttgcgtggtgcatgttacctgaggcgtcttaatgctctgagaaatgatccgaggattgatcttgagactgaagatgctgcctttgtctatgagccaacgaatgcgctttgagtagttagcttaatcacttaggtcacctcgagtatcaaaatctatttagaaatacacaatattttgttgcaggcttgctggagaatcgatctgctatcataaaaattacaaaaaaattttatttgcctcaattattttaggattggtattaaggacgcttaaattatttgtcgggtcactacgcatcattgtgattgagaagatcagcgatacgaaatattcgtagtactatcgataatttatttgaaaattcataagaaaagcaaacgttacatgaattgatgaaacaatacaaagacagataaagccacgcacatttaggatattggccgagattactgaatattgagtaagatcacggaatttctgacaggagcatgtcttcaattcagcccaaatggcagttgaaatactcaaaccgccccatatgcaggagcggatcattcattgtttgtttggttgcctttgccaacatgggagtccaaggttggcgcgccgaattcgcggccgcttaattaatcacgagtggatgactgtcacgactgactcatgactgactactagtgctagcctcgaggtcgacacaactttgtataataaagttgtctagacctaggagctgtgctgggtaactcacatgagtcactggtcacatcagcggccgcctcccagtatcattatagtgaaagttttggctctctcgccggtggttttttacctctatttaaaggggttttccacctaaaaattctggtatcattctcactttacttgttactttaatttctcataatctttggttgaaattatcacgcttccgcacacgatatccctacaaatttattatttgttaaacattttcaaaccgcataaaattttatgaagtcccgtctatctttaatgtagtctaacattttcatattgaaatatataatttacttaattttagcgttggtagaaagcataatgatttattcttattcttcttcatataaatgtttaatatacaatataaacaaattctttaccttaagaaggatttcccattttatattttaaaaatatatttatcaaatatttttcaaccacgtaaatctcataataataagttgtttcaaaagtaataaaatttaactccataatttttttattcgactgatcttaaagcaacacccagtgacacaactagccatttttttctttgaataaaaaaatccaattatcattgtattttttttatacaatgaaaatttcaccaaacaatgatttgtggtatttctgaagcaagtcatgttatgcaaaattctataattcccatttgacactacggaagtaactgaagatctgcttttacatgcgagacacatcttctaaagtaattttaataatagttactatattcaagatttcatatatcaaatactcaatattacttctaaaaaattaattagatataattaaaatattacttttttaattttaagtttaattgttgaatttgtgactattgatttattattctactatgtttaaattgttttatagatagtttaaagtaaatataagtaatgtagtagagtgttagagtgttaccctaaaccataaactataagatttatggtggactaattttcatatatttcttattgcttttaccttttcttggtatgtaagtccgtaactggaattactgtgggttgccatgacactctgtggtcttttggttcatgcatggatcttgcgcaagaaaaagacaaagaacaaagaaaaaagacaaaacagagagacaaaacgcaatcacacaaccaactcaaattagtcactggctgatcaagatcgccgcgtccatgtatgtctaaatgccatgcaaagcaacacgtgcttaacatgcactttaaatggctcacccatctcaacccacacacaaacacattgcctttttcttcatcatcaccacaaccacctgtatatattcattctcttccgccacctcaatttcttcacttcaacacacgtcaacctgcatatgcgtgtcatcccatgcccaaatctccatgcatgttccaaccaccttctctcttatataatacctataaatacctctaatatcactcacttctttcatcatccatccatccagagtactactactctactactataataccccaacccaactcatattcaatactactctaggatccacaaccaaaaatgcttcagcacacttggcttccgaagcctcccaatctgaccctcttgtcagatgaggttcatctctggaggattcctcttgaccagcctgagtcacaacttcaagaccttgctgccaccctgagcagtgatgaattggcgagggcaaacagattctactttccagaacacagaaggcgtttcactgctgggagaggcatcctcagatccatcttgggtggatacttgggagtggaaccgggtcaagtcaagtttgattatgagtcccgtgggaaaccgatccttggtgacagatttgctgagagtggactcctgttcaacttgtctcacagccagaaccttgccttgtgtgctgtcaactacacgcgtcaaataggcattgatcttgaatatctgcgtccaacatctgacttggagtctcttgcaaagaggttctttctcccaagagaatatgaactcttgaggtcactccctgatgagcagaaacagaagattttctttcgttactggacttgcaaagaggcttatctcaaagcaacgggagatggaatagccaaacttgaagagatcgagatagcactcaccccaacagaacctgccaagctccaaacagctcctgcgtggtctctgttggagcttgtgccagatgacaattgtgttgcagctgtggctgttgcgggttttggttggcagcccaagttctggcattactgagtagttagcttaatcacttaggtcacctcgagtatcaaaatctatttagaaatacacaatattttgttgcaggcttgctggagaatcgatctgctatcataaaaattacaaaaaaattttatttgcctcaattattttaggattggtattaaggacgcttaaattatttgtcgggtcactacgcatcattgtgattgagaagatcagcgatacgaaatattcgtagtactatcgataatttatttgaaaattcataagaaaagcaaacgttacatgaattgatgaaacaatacaaagacagataaagccacgcacatttaggatattggccgagattactgaatattgagtaagatcacggaatttctgacaggagcatgtcttcaattcagcccaaatggcagttgaaatactcaaaccgccccatatgcaggagcggatcattcattgtttgtttggttgcctttgccaacatgggagtccaaggttggcgcgccgaattcgcggccgcttaattaactactgtcactgaggccgtagacgagtacggactgatctaactagtgctagcctcgaggtcgacacccagcttt

SEQ ID NO: 49 - DNA, 35836 bp, Artificial sequence
  plasmid pDAB7380
cttgtacaaagtggttgcggccgcttaattaaatttaaattcaattaatgcaatcttgattttcaacaacgaaggtaatggcgtaaaagaaaaaatgtatgttattgtattgatctttcatgatgttgaagcgtgccataatatgatgatgtataattaaaatattaactgtcgcattttattgaaatggcactgttatttcaaccatatctttgattctgttacatgacacgactgcaagaagtaaataatagacgccgttgttaaagaattgctatcatatgtgcctaactagagggaatttgagcgtcagacctaatcaaatattacaaaatatctcactctgtcgccagcaatggtgtaatcagcgcagacaaatggcgtaaagatcgcggaaaaacctccccgagtggcatgatagctgcctctgtattgctgatttagtcagccttatttgacttaagggtgccctcgttagtgacaaattgctttcaaggagacagccatgccccacactttgttgaaaaacaaattgcctttggggagacggtaaagccagttgctcttcaataaggaatgtcgaggaggcaatgtaaccgcctctggtagtacacttctctaatccaaaaatcaatttgtattcaagataccgcaaaaaacttatggtttaaaccctgcaggactagtccagaaggtaattatccaagatgtagcatcaagaatccaatgtttacgggaaaaactatggaagtattatgtaagctcagcaagaagcagatcaatatgcggcacatatgcaacctatgttcaaaaatgaagaatgtacagatacaagatcctatactgccagaatacgaagaagaatacgtagaaattgaaaaagaagaaccaggcgaagaaaagaatcttgaagacgtaagcactgacgacaacaatgaaaagaagaagataaggtcggtgattgtgaaagagacatagaggacacatgtaaggtggaaaatgtaagggcggaaagtaaccttatcacaaaggaatcttatcccccactacttatccttttatatttttccgtgtcatttttgcccttgagttttcctatataaggaaccaagttcggcatttgtgaaaacaagaaaaaatttggtgtaagctattttctttgaagtactgaggatacaacttcagagaaatttgtaagtttgtaggtaccagatctggatcccaaaccatgtctccggagaggagaccagttgagattaggccagctacagcagctgatatggccgcggtttgtgatatcgttaaccattacattgagacgtctacagtgaactttaggacagagccacaaacaccacaagagtggattgatgatctagagaggttgcaagatagatacccttggttggttgctgaggttgagggtgttgtggctggtattgcttacgctgggccctggaaggctaggaacgcttacgattggacagttgagagtactgtttacgtgtcacataggcatcaaaggttgggcctaggatctacattgtacacacatttgcttaagtctatggaggcgcaaggttttaagtctgtggttgctgttataggccttccaaacgatccatctgttaggttgcatgaggctttgggatacacagcccggggtacattgcgcgcagctggatacaagcatggtggatggcatgatgttggtttttggcaaagggattttgagttgccagctcctccaaggccagttaggccagttacccaaatctgagtagttagcttaatcacctagagctcgatcggcggcaatagcttcttagcgccatcccgggttgatcctatctgtgttgaaatagttgcggtgggcaaggctctctttcagaaagacaggcggccaaaggaacccaaggtgaggtgggctatggctctcagttccttgtggaagcgcttggtctaaggtgcagaggtgttagcgggatgaagcaaaagtgtccgattgtaacaagatatgttgatcctacgtaaggatattaaagtatgtattcatcactaatataatcagtgtattccaatatgtactacgatttccaatgtctttattgtcgccgtatgtaatcggcgtcacaaaataatccccggtgactttcttttaatccaggatgaaataatatgttattataatttttgcgatttggtccgttataggaattgaagtgtgcttgaggtcggtcgccaccactcccatttcataattttacatgtatttgaaaaataaaaatttatggtattcaatttaaacacgtatacttgtaaagaatgatatcttgaaagaaatatagtttaaatatttattgataaaataacaagtcaggtattatagtccaagcaaaaacataaatttattgatgcaagtttaaattcagaaatatttcaataactgattatatcagctggtacattgccgtagatgaaagactgagtgcgatattatggtgtaatacataggaattcgtttaaacgatctgcgtctaattttcggtccaacttgcacaggaaagacgtcgaccgcggtagctcttgcccagcagactgggcttccagtcctttcgctcgatcgggtccaatgttgtcctcagctgtgaaccggaagcggacgaccaacagtggaagaactgaaaggaacgagccgtctataccttgatgatcggcctctggtgaagggtatcatcgcagccaagcaagctcatgaaaggctgatgggggaggtgtataattatgaggcccacggcgggcttattctttagggaggatctatctcgttgctcaagtgcatggcgcaaagcagttattggagtgcggattttcgttggcatattattcgccacgagttagcagacgaagagaccttcatgaacgtggccaaggccagagttaagcagatgttacgccctgctgcaggcctttctattatccaatagttggttgatctttggaaagagcctcggctgaggcccatactgaaagagatcgatggatatcgatatgccatgttgtttgctagccagaaccagatcacatccgatatgctattgcagcttgacgcagatatggaggataagttgattcatgggatcgctcaggagtagctcatccatgcacgccgacaagaacagaaattccgtcgagttaacgcagccgcttacgacggattcgaaggtcatccattcggaatgtattagtttgcaccagctccgcgtcacacctgtcttcatttgaataagatgttagcaattgtttttagctttgtcttgttgtggcagggcggcaagtgcttcagacatcattctgttttcaaattttatgctggagaacagcttcttaattcctttggaaataatagactgcgtcttaaaattcagatgtctggatatagatatgattgtaaaataacctatttaagtgtcatttagaacataagttttatgaatgttcttccattttcgtcatcgaacgaataagagtaaatacaccttttttaacattacaaataagttcttatacgttgtttatacaccgggaatcatttccattattttcgcgcaaaagtcacggatattcgtgaaagcgacataaactgcgaaatttgcggggagtgtcttgagtttgcctcgaggctagcgcatgcacatagacacacacatcatctcattgatgcttggtaataattgtcattagattgtttttatgcatagatgcactcgaaatcagccaattttagacaagtatcaaacggatgtgacttcagtacattaaaaacgtccgcaatgtgttattaagttgtctaagcgtcaatttgatttacaattgaatatatcctgccccagccagccaacagctcgatttacaattgaatatatcctgccggccggcccacgcgtgtcgaggaattctgatctggcccccatttggacgtgaatgtagacacgtcgaaataaagatttccgaattagaataatttgtttattgctttcgcctataaatacgacggatcgtaatttgtcgttttatcaaaatgtactttcattttataataacgctgcggacatctacatttttgaattgaaaaaaaattggtaattactctttctttttctccatattgaccatcatactcattgctgatccatgtagatttcccggacatgaagccatttacaattgaatatatcctgccgccgctgccgctttgcacccggtggagcttgcatgttggtttctacgcagaactgagccggttaggcagataatttccattgagaactgagccatgtgcaccttccccccaacacggtgagcgacggggcaacggagtgatccacatgggacttttaaacatcatccgtcggatggcgttgcgagagaagcagtcgatccgtgagatcagccgacgcaccgggcaggcgcgcaacacgatcgcaaagtatttgaacgcaggtacaatcgagccgacgttcacgcggaacgaccaagcaagcttggctgccatttttggggtgaggccgttcgcggccgaggggcgcagcccctggggggatgggaggcccgcgttagcgggccgggagggttcgagaagggggggcaccccccttcggcgtgcgcggtcacgcgcacagggcgcagccctggttaaaaacaaggtttataaatattggtttaaaagcaggttaaaagacaggttagcggtggccgaaaaacgggcggaaacccttgcaaatgctggattttctgcctgtggacagcccctcaaatgtcaataggtgcgcccctcatctgtcagcactctgcccctcaagtgtcaaggatcgcgcccctcatctgtcagtagtcgcgcccctcaagtgtcaataccgcagggcacttatccccaggcttgtccacatcatctgtgggaaactcgcgtaaaatcaggcgttttcgccgatttgcgaggctggccagctccacgtcgccggccgaaatcgagcctgcccctcatctgtcaacgccgcgccgggtgagtcggcccctcaagtgtcaacgtccgcccctcatctgtcagtgagggccaagttttccgcgaggtatccacaacgccggcggccgcggtgtctcgcacacggcttcgacggcgtttctggcgcgtttgcagggccatagacggccgccagcccagcggcgagggcaaccagcccggtgagcgtcggaaagggtcgacggatcttttccgctgcataaccctgcttcggggtcattatagcgattttttcggtatatccatcctttttcgcacgatatacaggattttgccaaagggttcgtgtagactttccttggtgtatccaacggcgtcagccgggcaggataggtgaagtaggcccacccgcgagcgggtgttccttcttcactgtcccttattcgcacctggcggtgctcaacgggaatcctgctctgcgaggctggccggctaccgccggcgtaacagatgagggcaagcggatggctgatgaaaccaagccaaccaggaagggcagcccacctatcaaggtgtactgccttccagacgaacgaagagcgattgaggaaaaggcggcggcggccggcatgagcctgtcggcctacctgctggccgtcggccagggctacaaaatcacgggcgtcgtggactatgagcacgtccgcgagctggcccgcatcaatggcgacctgggccgcctgggcggcctgctgaaactctggctcaccgacgacccgcgcacggcgcggttcggtgatgccacgatcctcgccctgctggcgaagatcgaagagaagcaggacgagcttggcaaggtcatgatgggcgtggtccgcccgagggcagagccatgacttttttagccgctaaaacggccggggggtgcgcgtgattgccaagcacgtccccatgcgctccatcaagaagagcgacttcgcggagctggtattcgtgcagggcaagattcggaataccaagtacgagaaggacggccagacggtctacgggaccgacttcattgccgataaggtggattatctggacaccaaggcaccaggcgggtcaaatcaggaataagggcacattgccccggcgtgagtcggggcaatcccgcaaggagggtgaatgaatcggacgtttgaccggaaggcatacaggcaagaactgatcgacgcggggttttccgccgaggatgccgaaaccatcgcaagccgcaccgtcatgcgtgcgccccgcgaaaccttccagtccgtcggctcgatggtccagcaagctacggccaagatcgagcgcgacagcgtgcaactggctccccctgccctgcccgcgccatcggccgccgtggagcgttcgcgtcgtctcgaacaggaggcggcaggtttggcgaagtcgatgaccatcgacacgcgaggaactatgacgaccaagaagcgaaaaaccgccggcgaggacctggcaaaacaggtcagcgaggccaagcaggccgcgttgctgaaacacacgaagcagcagatcaaggaaatgcagctttccttgttcgatattgcgccgtggccggacacgatgcgagcgatgccaaacgacacggcccgctctgccctgttcaccacgcgcaacaagaaaatcccgcgcgaggcgctgcaaaacaaggtcattttccacgtcaacaaggacgtgaagatcacctacaccggcgtcgagctgcgggccgacgatgacgaactggtgtggcagcaggtgttggagtacgcgaagcgcacccctatcggcgagccgatcaccttcacgttctacgagctttgccaggacctgggctggtcgatcaatggccggtattacacgaaggccgaggaatgcctgtcgcgcctacaggcgacggcgatgggcttcacgtccgaccgcgttgggcacctggaatcggtgtcgctgctgcaccgcttccgcgtcctggaccgtggcaagaaaacgtcccgttgccaggtcctgatcgacgaggaaatcgtcgtgctgtttgctggcgaccactacacgaaattcatatgggagaagtaccgcaagctgtcgccgacggcccgacggatgttcgactatttcagctcgcaccgggagccgtacccgctcaagctggaaaccttccgcctcatgtgcggatcggattccacccgcgtgaagaagtggcgcgagcaggtcggcgaagcctgcgaagagttgcgaggcagcggcctggtggaacacgcctgggtcaatgatgacctggtgcattgcaaacgctagggccttgtggggtcagttccggctgggggttcagcagccagcgctttactggcatttcaggaacaagcgggcactgctcgacgcacttgcttcgctcagtatcgctcgggacgcacggcgcgctctacgaactgccgataaacagaggattaaaattgacaattgtgattaaggctcagattcgacggcttggagcggccgacgtgcaggatttccgcgagatccgattgtcggccctgaagaaagctccagagatgttcgggtccgtttacgagcacgaggagaaaaagcccatggaggcgttcgctgaacggttgcgagatgccgtggcattcggcgcctacatcgacggcgagatcattgggctgtcggtcttcaaacaggaggacggccccaaggacgctcacaaggcgcatctgtccggcgttttcgtggagcccgaacagcgaggccgaggggtcgccggtatgctgctgcgggcgttgccggcgggtttattgctcgtgatgatcgtccgacagattccaacgggaatctggtggatgcgcatcttcatcctcggcgcacttaatatttcgctattctggagcttgttgtttatttcggtctaccgcctgccgggcggggtcgcggcgacggtaggcgctgtgcagccgctgatggtcgtgttcatctctgccgctctgctaggtagcccgatacgattgatggcggtcctgggggctatttgcggaactgcgggcgtggcgctgttggtgttgacaccaaacgcagcgctagatcctgtcggcgtcgcagcgggcctggcgggggcggtttccatggcgttcggaaccgtgctgacccgcaagtggcaacctcccgtgcctctgctcacctttaccgcctggcaactggcggccggaggacttctgctcgttccagtagctttagtgtttgatccgccaatcccgatgcctacaggaaccaatgttctcggcctggcgtggctcggcctgatcggagcgggtttaacctacttcctttggttccgggggatctcgcgactcgaacctacagttgtttccttactgggctttctcagcccccgagcgcttagtgggaatttgtaccccttatcgaaccgggagcacaggatgacgcctaacaattcattcaagccgacaccgcttcgcggcgcggcttaattcaggagttaaacatcatgagggaagcggtgatcgccgaagtatcgactcaactatcagaggtagttggcgtcatcgagcgccatctcgaaccgacgttgctggccgtacatttgtacggctccgcagtggatggcggcctgaagccacacagtgatattgatttgctggttacggtgaccgtaaggcttgatgaaacaacgcggcgagctttgatcaacgaccttttggaaacttcggcttcccctggagagagcgagattctccgcgctgtagaagtcaccattgttgtgcacgacgacatcattccgtggcgttatccagctaagcgcgaactgcaatttggagaatggcagcgcaatgacattcttgcaggtatcttcgagccagccacgatcgacattgatctggctatcttgctgacaaaagcaagagaacatagcgttgccttggtaggtccagcggcggaggaactctttgatccggttcctgaacaggatctatttgaggcgctaaatgaaaccttaacgctatggaactcgccgcccgactgggctggcgatgagcgaaatgtagtgcttacgttgtcccgcatttggtacagcgcagtaaccggcaaaatcgcgccgaaggatgtcgctgccgactgggcaatggagcgcctgccggcccagtatcagcccgtcatacttgaagctaggcaggcttatcttggacaagaagatcgcttggcctcgcgcgcagatcagttggaagaatttgttcactacgtgaaaggcgagatcaccaaggtagtcggcaaataatgtctaacaattcgttcaagccgacgccgcttcgcggcgcggcttaactcaagcgttagagagctggggaagactatgcgcgatctgttgaaggtggttctaagcctcgtcttgcgatggcatttcgatccattcccattccgcgctcaagatggcttcccctcggcagttcatcagggctaaatcaatctagccgacttgtccggtgaaatgggctgcactccaacagaaacaatcaaacaaacatacacagcgacttattcacacgagctcaaattacaacggtatatatcctgccagtcagcatcatcacaccaaaagttaggcccgaatagtttgaaattagaaagctcgcaattgaggtctacaggccaaattcgctcttagccgtacaatattactcaccggatcctaaccggtttaattaaggcgcgccatgcccgggcaagcggccgcacaagtttgtacaaaaaagcaggcttctaggatctgcttttacatgcgagacacatcttctaaagtaattttaataatagttactatattcaagatttcatatatcaaatactcaatattacttctaaaaaattaattagatataattaaaatattacttttttaattttaagtttaattgttgaatttgtgactattgatttattattctactatgtttaaattgttttatagatagtttaaagtaaatataagtaatgtagtagagtgttagagtgttaccctaaaccataaactataagatttatggtggactaattttcatatatttcttattgcttttaccttttcttggtatgtaagtccgtaactggaattactgtgggttgccatgacactctgtggtcttttggttcatgcatggatcttgcgcaagaaaaagacaaagaacaaagaaaaaagacaaaacagagagacaaaacgcaatcacacaaccaactcaaattagtcactggctgatcaagatcgccgcgtccatgtatgtctaaatgccatgcaaagcaacacgtgcttaacatgcactttaaatggctcacccatctcaacccacacacaaacacattgcctttttcttcatcatcaccacaaccacctgtatatattcattctcttccgccacctcaatttcttcacttcaacacacgtcaacctgcatatgcgtgtcatcccatgcccaaatctccatgcatgttccaaccaccttctctcttatataatacctataaatacctctaatatcactcacttctttcatcatccatccatccagagtactactactctactactataataccccaacccaactcatattcaatactactctaggatccacaaccaaaaatggcagcgaggctgcaagagcagaaaggaggtgagatggacacgaggattgcgatcataggcatgagcgccatacttccttgtggaaccacggtgagagagtcatgggagaccataagggctggcattgattgcctgtctgatcttcctgaggatcgtgttgatgtgactgcgtactttgacccagtcaagaccacaaaggacaaaatctactgcaagagaggaggtttcattcctgagtatgactttgatgcgcgtgagtttggtctcaacatgttccagatggaagattctgatgcgaatcagaccatctcacttctcaaggtcaaagaagcacttcaagatgctgggattgatgcacttggaaaggagaagaaaaacataggatgcgtgcttggcattggaggtggacagaagagttcacatgagttctacagcagactcaactatgtggttgtggagaaagtcttgagaaagatggggatgccagaggaagatgtcaaagtggctgtggagaagtacaaagcgaacttcccagaatggagacttgactctttccctggattccttgggaatgtcactgctggcagatgcaccaacacattcaacttggatggcatgaactgcgttgtggatgctgcatgtgcaagctccttgatagcagtcaaggttgcgattgatgaactgctctatggtgactgcgacatgatggtcactggtgcaacctgcacagacaactccattgggatgtacatggctttctcaaagacacctgtgttcagcacggacccaagtgtgagagcgtatgatgagaaaacgaaagggatgctcattggtgagggatcagccatgttggtgctcaaacgttatgcagatgcagtgagggatggtgatgagattcatgctgtgattcgtggttgtgcaagctcaagtgatggcaaagcagctggcatctacactcccacaatcagtggtcaagaggaagccttgagacgtgcatacaatcgtgcctgcgttgaccctgccactgtcactttggttgagggtcatgggactggcactccagttggagataggattgagttgactgcgttgaggaacttgtttgacaaagcgtatggtgaagggaacacagagaaagttgcagttggaagtatcaagtccagtattggtcatttgaaggctgttgctggtcttgctggaatgatcaaggtcatcatggctctcaaacacaagactttgcctggaacgatcaatgtggacaatccacccaatctctatgacaacactcccatcaatgagtcatccctctacatcaacacgatgaacagaccctggttccctccacctggtgttccgagacgtgctggaatatccagctttggctttggaggtgccaactaccatgcagtgttggaagaggctgaaccagagcacacgacagcgtacagactcaacaaacgtccacaaccggtgttgatgatggctgcaactcctgctgcgttgcagagcctttgtgaagctcagctgaaagagtttgaagctgcgatcaaggagaatgagacagtcaagaatactgcctacatcaagtgtgtcaagtttggagaacagttcaagttccctgggagcatacctgcgaccaatgcgagactgggattcttggtcaaagatgcggaggatgcgtgctccacgcttcgtgctatatgtgctcagtttgccaaagatgtgaccaaagaagcgtggaggcttccgagagaaggagtttctttccgtgccaaaggcattgccaccaatggtgctgttgctgcactcttctctggacaaggtgctcagtacacacacatgttcagtgaagttgcgatgaactggcctcagttcagacagtccattgctgcaatggacgctgcacagtccaaggttgctggaagtgacaaagactttgaaagagtctctcaagtcctgtacccaaggaaaccgtacgaacgtgagccagaacaagatcacaagaaaatctcactcacagcatacagccagccgtcaaccctggcatgtgctcttggtgcctttgagattttcaaggaagctggattcactccagactttgcagctggacacagcttgggtgagtttgctgcgctctatgcagctggttgtgttgacagagatgagttgtttgaacttgtttgcagaagggcaaggatcatgggaggcaaagatgcacctgccacacccaaaggttgcatggcagctgtcataggacccaacgcagagaacatcaaggttcaagctgccaacgtctggcttggaaactcaaactctccgtctcagactgtcattactgggtctgttgaagggattcaagctgaaagtgccagattgcagaaggaagggttcagagttgtgcctcttgcttgtgagtctgccttccattctccacagatggaaaatgccagctcagctttcaaagatgtcatatccaaggtttccttccgtacacccaaagcagaaacaaagctcttcagcaatgtttctggagagacctatccgacggatgccagagagatgctcactcaacacatgacctcatctgtgaagttcctgacccaagtgaggaacatgcaccaagctggtgcgagaatctttgttgagtttggaccgaaacaagttctcagcaaacttgtttctgaaaccctcaaagatgacccgtctgttgtcacagtgtctgtgaacccagcttctggcacggactctgacatacagttgagggatgctgcagttcagctggttgtggctggtgtcaatcttcaagggtttgacaagtgggatgctcctgatgccacgaggatgcaagccatcaagaaaaagagaaccacactcagactttcagctgccacctatgtcagtgacaagaccaagaaagtgagggatgctgccatgaacgacggaagatgtgtcacatacctcaagggtgctgcaccactcatcaaggctcctgaacctgtggttgacgaagctgccaagagggaggctgaaaggcttcagaaggagcttcaagacgctcagaggcagcttgacgacgccaaacgtgcagctgcagaagccaactccaaacttgctgctgccaaggaggaagccaagactgctgcagcttcagccaagcctgcagttgacactgctgttgtggagaaacatcgtgccatcctcaagtccatgctggctgagctggatggttatggaagtgttgatgcttcttcccttcagcaacagcaacagcaacagactgctccggcgcctgttaaagccgctgcccctgccgctcccgttgcaagtgctcctgctcccgccgtgtccaacgagttgcttgagaaagctgagacagttgtgatggaggttctcgctgccaagactggatacgaaacagacatgattgaggcggacatggagcttgagactgagttgggaattgacagcatcaagagggttgaaattctttctgaagtccaagctatgcttaacgttgaggcgaaagatgttgatgctctctctaggacgagaacagtgggtgaagttgtcaacgctatgaaggcagaaatcgctggttcttccgctccggcgccggcagctgccgcacctgcaccggctaaagcggctccagctgcagctgcaccagctgtttctaatgagctgctcgaaaaggcagaaactgttgtgatggaagtccttgctgccaaaactggctacgaaactgacatgatagaatcagacatggagcttgagacggagcttggaattgattccatcaagcgtgtggaaatcctcagtgaagtccaagccatgctcaatgtggaagctaaggatgtggatgctctctcaaggaccagaactgtcggtgaggttgtcaatgccatgaaggctgagatagctggaggctccgctcctgcgccggccgctgccgctcctggtcccgctgccgcggctccagctccagctgcagccgctccggccgtctcaaacgaactccttgaaaaagctgagaccgtcgtgatggaggtcttggcagctaaaaccggctatgagactgacatgattgagtctgacatggaattggagacagaacttgggatagacagcatcaaacgtgttgaaatcctcagtgaggtccaagctatgctgaacgtggaagcgaaggatgttgatgctctgtccagaacgaggaccgttggtgaggttgtggatgccatgaaggctgaaattgctggagggtctgcgcccgcgccagctgcagccgctcctgcacccgcagccgcggcacctgctccagctgcacctgcacctgccgtttcttcagaactcttggagaaggctgagacggttgtgatggaggttttggctgcaaagactggctatgagaccgacatgattgaatctgatatggaattggagacagagcttgggatcgattccatcaaaagagtggagatcctgagtgaagtccaagccatgctcaatgttgaagctaaggatgttgatgcactttcaagaacaaggacagtgggtgaggttgtggatgccatgaaggcggagattgctggagggagcgcgcctgcgccagctgccgcggcacctgcaccggcagccgcagctccagctccagctgcaccagcaccggccgcgcccgcgccagctgtttcatccgaactcctggaaaaggccgagacggttgtgatggaggtgctcgcagctaagactggttacgagaccgacatgattgaaagtgacatggagcttgaaaccgagttgggaatagatagcatcaaacgtgttgaaatcttgtctgaggtccaagctatgttgaacgtggaggcaaaagatgtcgatgcgctttcaagaaccagaacagtcggtgaggtcgtggacgccatgaaggctgaaattgccggaagctctgctagtgcgccagctgcagccgcacctgcacctgctgccgcggcacctgctccagctgcagccgctcctgccgtcagcaatgagttgctggagaaagccgaaacagttgtgatggaagtccttgctgcaaaaactggttacgaaacggacatgattgagtcagacatggaattggagaccgaacttggaatagattccatcaagagagtggagatcctctctgaggtgcaagccatgctcaacgttgaggctaaagatgttgatgcactcagtaggacaagaactgtgggggaagttgtcgatgcgatgaaggctgagattgctggaggctctgctcctgcgccggcagctgccgcacctgcacccgcagccgcggcaccagctgtcagcaacgaattgcttgagaaggctgaaacagttgtcatggaagtgctggctgcaaaaaccggctatgagactgacatgattgagtctgacatggaacttgagacggaattgggcattgacagcatcaagcgtgttgagatcctcagtgaagtccaagcaatgctcaatgtggaggctaaggatgtggatgccctctcaaggaccagaacagttggtgaggtcgttgatgcgatgaaggcggagatcgctggaagttccgcgcctgcgccagctgcagccgctcctgcacccgcagccgcggcaccggctccagctgcagccgcaccggccgtctcctcagaactcctggaaaaggctgagacagttgtgatggaagtccttgctgcgaaaactggctatgagaccgacatgattgaatctgacatggaactggagaccgagcttggaattgactccatcaaacgtgttgaaatcctctctgaggttcaagcgatgttgaatgtggaggccaaagatgttgatgctctttccagaacaaggacggtgggagaggtggttgatgccatgaaggctgagatagctgggggttctgctcctgcgccagctgcagccgctcctgctcccgctgccgcggcaccagctgtcagcaacgaactccttgaaaaagctgaaactgttgtgatggaggttttggctgcaaagactggatacgagactgacatgatagagtcagacatggagttggaaacagagcttgggattgatagcatcaagcgtgtggaaatcctttctgaggttcaagccatgctgaacgttgaggccaaagatgtcgatgctttgtcaaggaccagaacggttggagaagtggtcgatgccatgaaggctgagatagctggtggatcagcccctgctccggctgcagccgctcctgcaagtgccggtgctgcaccagctgtgaagattgattcagttcatggtgctgactgtgacgatttgtcactgatgcacgcaaaggtggttgacatcagaaggccagatgaactgattctggaaagaccggagaaccgtccagttcttgtcgttgacgatggctcagagttgacacttgctcttgtgagggtgttgggagcctgtgcagttgtcttgacctttgagggattgcagttggctcagagagctggtgcagctgccattcgtcatgttctggctaaggacctttcagcagaatcagctgagaaggccatcaaagaggctgagcaaagatttggagcgttgggaggcttcataagccagcaagcagaaaggtttgaaccagctgagatactgggtttcacactcatgtgtgcgaagtttgccaaagcctctctctgcactgctgtggctggaggtcgtcctgccttcatcggtgtggctaggcttgacggcagacttggattcacctctcaaggcacttctgacgcactcaagagagcacagcgtggagcgatctttggactctgcaagacaatagggttggagtggtcagaatctgatgtgttcagccgtggtgtggacattgctcaagggatgcacccagaagatgctgcagttgccatagttagggagatggcgtgtgctgacatcagaatcagagaggttgggattggagcaaaccagcaaagatgcacaatcagagctgccaagttggagactgggaaccctcagagacagatagcgaaagacgatgtgcttctggtttctggaggtgctcgtgggatcacacctctttgcatccgtgagatcacgcgtcagattgctggaggcaagtacattctgttgggtcgtagcaaagtttctgcgtctgaaccagcatggtgtgctggcatcactgatgagaaggctgtgcagaaagctgccacccaagagttgaagagggccttcagtgctggtgaaggacccaaacccactccaagggctgtcacgaaacttgtgggatctgttcttggtgctcgtgaagtgagaagctccattgctgccattgaagctctgggtggcaaagcgatctacagctcttgtgatgtgaactctgctgcagatgttgccaaagcagttagggatgcagagtcccagcttggtgccagagttagtggaatcgttcacgcttctggtgtgctccgtgatcgtctcatagagaagaaactccctgacgagtttgatgctgtctttgggaccaaagtcactgggttggagaatcttctggctgcagttgatcgtgccaacctcaaacacatggttctcttcagctcccttgctggtttccacggcaatgttggtcagtctgactatgcgatggcaaacgaagctctcaacaagatgggtttggaacttgcgaaggatgtcagtgtcaagtccatctgctttggtccctgggatggtgggatggtgacacctcaactcaagaaacagtttcaagaaatgggagttcagatcattcctcgtgaaggaggtgctgatacagttgcgaggattgtgttgggatcaagtcctgctgagatccttgttggaaactggaggacaccatccaagaaagttggaagtgacacgatcaccctgcatagaaagatcagtgccaagtccaatcccttcttggaggatcatgtcatacaaggcagaagggtgttgccaatgacccttgctattgggagccttgctgagacctgccttggactcttccctggctactctctctgggccatagatgacgcacagctcttcaaaggtgtcactgttgatggagacgtcaactgtgaagtgaccctcacaccgtccactgctccgagtgggagggtgaatgtccaagcgacgctcaagacgttctcaagtggaaaacttgttccagcctacagagctgtcatagtgttgtccaaccaaggtgctccacctgccaatgcaaccatgcagcctccgagccttgatgcagatcctgctttgcaagggtcagtctatgatggcaagactctctttcatggtcctgcgttcagaggcattgatgacgttctcagctgcaccaagagccagcttgttgccaagtgttctgctgttcctggatcagatgcagccagaggagagtttgcaactgacactgatgcacatgatccctttgtcaatgatcttgcctttcaagcaatgttggtctgggtgaggagaacgctgggacaagctgcactcccgaactccattcagaggatagtccaacacagaccggtcccacaagacaaacccttctacatcaccctcagatccaatcagagtggtggacatagccagcacaaacatgcacttcagttccacaacgaacaaggtgatctcttcattgatgttcaagcctctgtcattgcgacagactcacttgcgttctgagtagttagcttaatcacttaggtcacctcgagtatcaaaatctatttagaaatacacaatattttgttgcaggcttgctggagaatcgatctgctatcataaaaattacaaaaaaattttatttgcctcaattattttaggattggtattaaggacgcttaaattatttgtcgggtcactacgcatcattgtgattgagaagatcagcgatacgaaatattcgtagtactatcgataatttatttgaaaattcataagaaaagcaaacgttacatgaattgatgaaacaatacaaagacagataaagccacgcacatttaggatattggccgagattactgaatattgagtaagatcacggaatttctgacaggagcatgtcttcaattcagcccaaatggcagttgaaatactcaaaccgccccatatgcaggagcggatcattcattgtttgtttggttgcctttgccaacatgggagtccaaggttggcgcgccgaattcgcggccgcttaattaagatgagtgatactcaggactcaggactcactctgctgatcactagtgctagcctcgaggtcgacacaactttgtatacaaaagttgtctaggatctgcttttacatgcgagacacatcttctaaagtaattttaataatagttactatattcaagatttcatatatcaaatactcaatattacttctaaaaaattaattagatataattaaaatattacttttttaattttaagtttaattgttgaatttgtgactattgatttattattctactatgtttaaattgttttatagatagtttaaagtaaatataagtaatgtagtagagtgttagagtgttaccctaaaccataaactataagatttatggtggactaattttcatatatttcttattgcttttaccttttcttggtatgtaagtccgtaactggaattactgtgggttgccatgacactctgtggtcttttggttcatgcatggatcttgcgcaagaaaaagacaaagaacaaagaaaaaagacaaaacagagagacaaaacgcaatcacacaaccaactcaaattagtcactggctgatcaagatcgccgcgtccatgtatgtctaaatgccatgcaaagcaacacgtgcttaacatgcactttaaatggctcacccatctcaacccacacacaaacacattgcctttttcttcatcatcaccacaaccacctgtatatattcattctcttccgccacctcaatttcttcacttcaacacacgtcaacctgcatatgcgtgtcatcccatgcccaaatctccatgcatgttccaaccaccttctctcttatataatacctataaatacctctaatatcactcacttctttcatcatccatccatccagagtactactactctactactataataccccaacccaactcatattcaatactactctaggatccacaaccaaaaatggctgcaaggaacgtgagtgcggctcatgagatgcatgacgagaagaggatagctgttgtgggcatggctgttcagtatgctggatgcaaaacgaaagacgagttctgggaagttctcatgaatggaaaagttgagagcaaagtgatcagcgacaaacgtcttggttcaaattaccgtgctgaacactacaaagctgaaaggagcaagtatgctgacaccttctgcaatgagacatatggaactcttgatgagaacgaaatagacaatgagcatgaactccttttgaaccttgccaaacaagccttggctgaaacatctgtcaaagattcaacaagatgtggcatagtttctggatgcctcagcttcccgatggacaacctccaaggtgaactcttgaatgtgtaccagaaccatgttgagaagaaacttggtgccagagttttcaaagatgcctctcactggtcagaaagagaacagtccaacaaaccagaggctggtgacagaagaatcttcatggaccctgcttcctttgttgctgaggaactcaatcttggcgctctccactactctgttgatgctgcctgtgccactgcgctctatgtgctcagactggcgcaagatcacttggtctctggtgcagctgatgtgatgctttgtggtgcaacatgcctgccggagccgtttttcatactctctgggttctcaaccttccaagccatgcctgttggaacgggtcagaatgtgtccatgccgctgcacaaagattctcaaggattgacccctggtgaaggaggttccatcatggtcctcaaacgtttggatgacgcaatcagagatggagatcacatctatggaacacttttgggagccaatgtcagcaacagtggcactggtctgccacttaaaccccttttgccgtcagagaaaaagtgcctcatggacacctacacacgtatcaatgtgcatccccacaagattcagtatgttgaatgccatgcaactgggactccacaaggtgatcgtgtggaaattgatgctgtgaaggcttgctttgaaggcaaagtcccacgttttggaaccacaaaagggaactttggacacacattggtggcagctgggtttgctggcatgtgcaaagtgcttctctccatgaagcacgggatcattccacccactccgggaatagatgacgaaacgaagatggaccctctggttgtctctggtgaggccattccctggccagaaacgaatggagaaccgaagcgtgctggtctctcagcgtttggatttggtgggaccaatgctcatgctgtctttgaggaacatgacccaagcaatgctgcatgcactggccatgactccatttctgctctctctgcacgttgtggtggtgagtcaaacatgagaatagcaatcactgggatggatgccacttttggtgctttgaaaggattggatgcttttgaaagggccatctacactggtgctcatggtgctataccactcccagaaaagagatggagattcctggggaaagacaaggacttccttgatctttgtggagtcaaagcaacaccgcatggctgttacattgaagatgttgaagttgatttccagaggctgaggactccaatgactcctgaagatatgctcttgcctcaacagcttctggctgtcaccacaattgatagggccatattggactctggcatgaagaaaggtggaaatgtggctgtctttgtggggttggggaccgatcttgaactctaccgtcaccgtgcaagggttgctctcaaggagagagtgaggcctgaagccagcaagaaactcaatgacatgatgcagtacatcaatgattgtgggacaagcacttcttacaccagctacataggcaacttggttgcaacaagggtcagttcacaatggggcttcacgggaccttccttcacaatcacagaaggcaacaattctgtgtacagatgtgctgaacttggcaaatacctcttggaaacgggagaggttgatggggttgtggttgcgggtgttgatctctgtgggagtgctgagaacctttacgtcaagtcaaggcgtttcaaggtgtctacatctgacaccccgagagccagctttgatgcagctgctgatggttactttgttggagagggctgtggtgcatttgtgctcaagcgtgagacaagctgcaccaaggatgacagaatctatgcttgcatggatgccatagttcctggaaatgttccatctgcatgtttgagagaggcattggatcaagccagagtcaagcctggagacatcgagatgttggagctttctgctgattcagcgaggcatttgaaggacccgtctgttctcccaaaggaactcactgctgaggaagagattggcggacttcagacgattcttcgtgacgatgacaagctcccaaggaatgttgcaactggaagtgtcaaggccactgttggtgacactggttatgcttctggtgctgccagtttgattaaggctgcgctttgcatctacaaccgttacctgcccagcaatggagatgactgggatgaacctgcacctgaagcaccctgggacagcacactctttgcgtgccagacctcaagagcttggttgaagaaccctggtgagagacgttatgcggctgtttccggagtcagtgaaaccagaagttgctacagtgtgctgctttctgaagcagagggacactacgagagagagaacagaatcagtttggatgaggaagcacccaagctcattgtgttgagagcagactcccatgaagagattcttggaagattggacaagataagggaaaggttcttgcagcccacgggtgctgcacccagagagtctgaattgaaggcgcaagcccgtaggatctttcttgaactccttggtgagacccttgcccaagatgcagcttcatctggaagtcagaagccccttgctctcagcttggtctccactccatccaagctccagagagaggtggaacttgcggcaaaaggcattccgagatgtctcaagatgagacgtgattggagttcccctgctggaagcagatatgcgcctgagcctttggccagtgacagagttgccttcatgtatggagaaggaaggagcccttactatggcatcacacaagacattcataggatttggcctgaacttcatgaggtcatcaatgagaaaacaaaccgtctctgggctgaaggtgacagatgggtcatgccaagggccagcttcaagagtgagcttgagtcacaacagcaagagtttgacagaaacatgattgaaatgttccgtcttggaatcctcacctcaattgccttcacaaacctggcgagagatgttctcaacatcacgcccaaagcagcctttggactcagtttgggagagatttccatgatctttgctttctccaagaaaaacggtttgataagcgatcagttgacaaaggatttgagagagtcagatgtctggaacaaagctctggctgttgagttcaatgcgctcagagaagcctggggcattccacagtctgtcccaaaagatgagttctggcaaggttacatagtgaggggaacgaaacaagacatagaagcagccatagcaccagactcaaagtatgtgaggttgaccatcatcaatgatgccaacactgctctcatcagtggaaagcctgatgcatgcaaagctgcgattgctcgtcttggtggcaacatccctgcgcttccagtcactcaaggcatgtgtgggcattgcccagaggtgggaccttacaccaaggacatcgcaaagatccacgccaaccttgagttccctgtggttgatggtcttgatctctggactaccataaaccagaagaggcttgtgccaagagccacgggtgccaaagatgaatgggctccttcatcctttggggagtatgctggacagctctatgagaaacaagccaacttccctcagatagttgaaaccatctacaagcagaactatgatgtgtttgttgaagttgggccaaacaatcacagaagcacagcagtgagaaccacgcttggaccacagagaaaccaccttgctggtgccatagacaagcagaacgaggatgcttggacgacaatagtcaagctcgtggcttcattgaaggctcaccttgttcctggagtgaccatcagtccgctctaccactccaagctcgttgcagaggctgaggcttgttatgctgcgctctgtaaaggtgagaaacccaagaaaaacaagtttgtgagaaagattcagttgaatggcagattcaacagcaaggcagaccccatctcctcagcagaccttgcatccttcccacctgcggaccctgcgattgaagctgccatctcttcaaggatcatgaagcctgtggctccgaaattctatgcgcgtctcaacattgatgagcaagatgagaccagagatccgatcttgaacaaggacaatgcgccttccagctccagctcttccagcagttcctcttccagcagttcatctccgtctcctgctccttcagctccagttcagaagaaagctgccccagctgcggagacaaaagctgttgccagtgctgatgcacttcgtagtgccctgcttgatcttgactccatgcttgcgctcagctctgcaagtgcttctggcaaccttgttgagactgcgccatctgatgccagtgtcattgtccctccgtgcaacattgctgatcttggcagcagagctttcatgaaaacttatggtgtttctgcgcctctgtacaccggtgcaatggccaagggaattgcctctgcggacttggtgatcgcagctggaaggcaaggaatccttgcgtcatttggtgctggaggccttccaatgcaagttgtgcgtgagtccattgaaaagattcaagctgccctgcccaatggaccatatgctgtcaacctcatccattctccttttgacagcaaccttgagaagggaaatgttgatctcttcttggaaaagggtgtcacttttgttgaggcttcagccttcatgacgttgacaccgcaagttgtcagatacagagcggctgggttgacgaggaatgcagatgggtcagtcaacataaggaacagaatcattgggaaagtctccagaactgagctggctgaaatgttcatgcgtcctgcacctgagcatcttttgcagaagctcattgcttctggggagatcaatcaagaacaagctgagttggccagacgtgttcctgtggctgatgacattgcggttgaagctgattctggtggacacactgacaaccgtccaatccatgtcattctgcctctgattatcaacctgagggataggcttcacagagagtgtggatacccagcaaacctgagggttcgtgttggtgctgggggtggcattgggtgtccccaagctgcgctggcaactttcaacatgggtgcctctttcattgtcactggaacagtgaaccaagttgccaaacaatctgggacgtgtgacaatgtgaggaaacagcttgcgaaagcaacttactcagatgtttgcatggcaccggcagctgacatgtttgaggaaggtgtgaaacttcaagttttgaagaaaggaacaatgttcccttcaagagccaacaaactctatgagttgttctgcaagtatgattcttttgagtccatgcctccagcagagcttgcgagggttgagaaaagaatcttcagtcgtgcattggaagaggtctgggatgagaccaagaacttctacatcaaccgtctccacaacccagagaagatacagagggctgagagggaccccaaactgaagatgtcactgtgtttcagatggtatctgtccctggcttcaaggtgggccaacactggagcttctgacagagtcatggactaccaagtttggtgtggtcctgccattggttcattcaatgatttcatcaaaggaacttaccttgatccggcagtggcaaatgagtacccgtgtgttgtgcagatcaacaaacagattcttagaggagcgtgcttcttgaggcgtcttgaaatactgagaaatgcaaggctttcagatggtgcagctgcacttgtggcgagcattgatgacacatatgtccctgctgagaagctgtgagtagttagcttaatcacttaggtcacctcgagtatcaaaatctatttagaaatacacaatattttgttgcaggcttgctggagaatcgatctgctatcataaaaattacaaaaaaattttatttgcctcaattattttaggattggtattaaggacgcttaaattatttgtcgggtcactacgcatcattgtgattgagaagatcagcgatacgaaatattcgtagtactatcgataatttatttgaaaattcataagaaaagcaaacgttacatgaattgatgaaacaatacaaagacagataaagccacgcacatttaggatattggccgagattactgaatattgagtaagatcacggaatttctgacaggagcatgtcttcaattcagcccaaatggcagttgaaatactcaaaccgccccatatgcaggagcggatcattcattgtttgtttggttgcctttgccaacatgggagtccaaggttggcgcgccgaattcgcggccgcttaattaatctgacctgaccactagacctgagtgagtacagatgtgctactagtgctagcctcgaggtcgaccaacttttctatacaaagttgtctaggatctgcttttacatgcgagacacatcttctaaagtaattttaataatagttactatattcaagatttcatatatcaaatactcaatattacttctaaaaaattaattagatataattaaaatattacttttttaattttaagtttaattgttgaatttgtgactattgatttattattctactatgtttaaattgttttatagatagtttaaagtaaatataagtaatgtagtagagtgttagagtgttaccctaaaccataaactataagatttatggtggactaattttcatatatttcttattgcttttaccttttcttggtatgtaagtccgtaactggaattactgtgggttgccatgacactctgtggtcttttggttcatgcatggatcttgcgcaagaaaaagacaaagaacaaagaaaaaagacaaaacagagagacaaaacgcaatcacacaaccaactcaaattagtcactggctgatcaagatcgccgcgtccatgtatgtctaaatgccatgcaaagcaacacgtgcttaacatgcactttaaatggctcacccatctcaacccacacacaaacacattgcctttttcttcatcatcaccacaaccacctgtatatattcattctcttccgccacctcaatttcttcacttcaacacacgtcaacctgcatatgcgtgtcatcccatgcccaaatctccatgcatgttccaaccaccttctctcttatataatacctataaatacctctaatatcactcacttctttcatcatccatccatccagagtactactactctactactataataccccaacccaactcatattcaatactactctaggatccacaaccaaaaatggcgcttcgtgtcaagaccaacaagaagccatgttgggagatgaccaaggaggaactgacctctggcaaaactgaggtgttcaactatgaggaactcctggagtttgcagagggtgacatagctaaggtttttggtccggagtttgctgtcatagacaagtaccccagaagggtgaggctgcctgctcgtgaatacctgcttgtgacaagggtcacactcatggatgccgaggtcaacaactacagagttggtgccagaatggtcactgagtatgatcttccagtgaatggcgaattgtctgagggaggtgattgtccctgggcagttctggttgagagtggacagtgcgatttgatgctgatatcatacatgggaattgatttccagaaccaaggtgacagagtttaccgtctgctcaacaccacgttgacattctatggggttgcccatgagggagagacccttgagtatgacatcagagtgaccggttttgccaaacgtttggatggtggcatctccatgttcttctttgagtatgactgctatgtcaatgggaggcttctcattgagatgagagatggctgtgctggcttcttcacaaatgaggagcttgatgcgggaaagggtgtggtgttcacaagaggggatttggctgccagagctaagattccaaagcaagatgtttctccctatgctgtcgctccctgccttcacaaaacaaaactcaacgaaaaggagatgcagaccttggttgacaaagattgggcttccgtttttggctcaaagaatggcatgccggagatcaactacaaactctgcgcacgtaagatgctcatgattgatagagtcaccagcattgaccataagggaggtgtgtacggtttgggtcagttggttggtgagaaaatcttggagagggaccattggtacttcccatgccattttgttaaggatcaagtcatggctggatctcttgtcagcgacggttgttcacaaatgctcaagatgtacatgatctggctcggtttgcaccttaccaccggaccatttgacttcagacccgtcaacggacacccgaacaaagttaggtgtaggggtcagatatctcctcataagggaaagttggtctacgtcatggagatcaaagagatgggattcgacgaggataacgatccgtacgccattgctgacgtcaacatcattgacgttgatttcgaaaagggtcaagatttcagccttgatagaatcagcgactacggaaagggggatcttaacaaaaagatcgtcgtggacttcaagggcattgctctcaagatgcagaagagatccacgaacaagaacccctccaaagttcagcccgtttttgctaacggtgcagccactgtgggaccggaagcgtccaaggccagctctggtgccagtgctagtgcttctgctgcccctgcgaagcctgctttctcagcagatgttcttgcgccaaagccagttgcacttcctgaacatatcctcaagggtgacgctctcgctccgaaagaaatgtcctggcatcccatgtcaaaacttcctggcaacccgacgccgttcttctcccctagttcttaccctccgagggcaatttgcttcatccctttccctggcaacccacttgacaacaattgcaaagctggagaaatgcctctgaactggtacaacatgtcagagttcatgtgtggaaaagttagcaactgcttgggaccagagttcgcaagatttgataagtcaaatacgagcagaagccctgcttttgatttggctcttgtgactagagttgttgaagtcacaaacatggaacatggcaagttcctgaatgttgattgcaatcccagcaaaggcacaatggtgggggagtttgactgtcctcaagatgcgtggttctttgatggttcttgcaatgatgggcacatgccttattccatcatcatggaaatcggacttcagacatccggtgttctcaccagtgtgttgaaagcaccactgacgatggacaaagatgacattctctttaggaaccttgatgcaagtgctgaaatggtgaggccagatgtggatgtgagggggaaaaccataaggaatgtgaccaagtgcactggatatgcaatgttgggaaagatggggattcacagattcacgtttgagttgtctgttgatggcgtggttttctacaaaggaagcacttcctttggatggttcactccagaggtgtttgctcagcaagctggacttgacaatgggaaaaagacggagccttggtgcaaaactaacaacacgagtgtgagaagagttgaaatcgcatcagccaaaggcaaagaacagctgactgagaaacttccagatgcaactaatgctcaagttctcagaaggtcagaacagtgtgagtatttggattacctcaacattgctcctgattctgggctgcatgggaaaggatatgcgcatggacacaaagatgttaacccacaagactggttcttctcttgtcacttttggtttgatcctgtgatgcctggatctttgggaattgagtcaatgttccagctcattgaggcatttgcggtggaccagaacataccgggagaatacaatgtgagcaatccgacctttgcccatgcccctggaaaaacggcgtggaagtaccgtggtcaattgacaccaaagaaccgtgcgatggactgtgaggtgcacatagtttcaatcacagcctctcctgaaaatggaggctacgttgacatagtggcagatggagcactttgggttgatggtctccgtgtgtatgaagccaaagaactcagagttcgtgttgtcagtgcaaaacctcaagccattccggatgttcaacaacagccacccagcgcaaaagcggaccctgggaaaactggagttgcactcagtccgactcagttgagagatgtcctgcttgaagtggacaatccattgtatcttggtgttgaaaactccaatttggtgcagtttgaatccaaacctgcaacttcttcaaggattgtcagtatcaaaccatgctccataagtgatcttggtgacaagtccttcatggaaacgtacaatgtgtcagcacctctgtacactggagcaatggccaagggaattgcgtctgcggaccttgtcattgctgctgggaagaggaagatattgggttcttttggagcgggtgggcttccaatgcaccatgtgagggcagctttggagaagatacaagcggctctgcctcaaggaccatatgctgtgaacctcattcattcaccttttgacagcaacttggaaaaggggaatgttgatctcttcctcgaaaagggcgttactgtggtggaggcttctgcattcatgaccctcactccccaagttgttcgttaccgtgcagccggactctcaaggaacgctgatgggagtgtcaacatcagaaaccgtatcattggaaaagtgtccagaacagaactcgccgaaatgttcatcagaccggctccggaacacctccttgagaaactcatagcttctggtgagataacacaagaacaagccgaacttgcccgtcgtgttcctgtcgcagacgacatcgctgttgaagctgattctggtggtcacactgacaaccgtcccatccacgtcatcttgcctttgatcatcaaccttaggaacagactgcacagagagtgtggttatcctgcgcaccttagagtcagagttggagctggaggcggtgttggctgcccacaagctgctgcggctgccctcacaatgggagctgccttcatagtgactgggactgtcaatcaagttgctaaacagtccgggacatgtgacaacgtgagaaaacaactcagtcaagccacctacagtgacatttgcatggctccagcagctgatatgtttgaggaaggtgtgaaactccaagttctcaagaagggaacaatgttcccatcaagagctaacaaattgtacgaactcttttgcaagtacgactctttcgattcaatgcctcctgctgaacttgaaaggatcgagaagaggatcttcaagagggcacttcaagaggtctgggaagagaccaaggacttttacatcaatggtttgaagaatccagagaagatacagagagcggaacatgaccccaaactcaagatgtctttgtgtttcagatggtatcttggtcttgcatcacgttgggccaacatgggtgctcctgatcgtgtcatggactatcaagtctggtgtggtccagccattggagccttcaatgacttcatcaaaggaacatatcttgatcctgctgtctctaatgagtacccatgtgttgtccagatcaaccttcagattttgcgtggtgcatgttacctgaggcgtcttaatgctctgagaaatgatccgaggattgatcttgagactgaagatgctgcctttgtctatgagccaacgaatgcgctttgagtagttagcttaatcacttaggtcacctcgagtatcaaaatctatttagaaatacacaatattttgttgcaggcttgctggagaatcgatctgctatcataaaaattacaaaaaaattttatttgcctcaattattttaggattggtattaaggacgcttaaattatttgtcgggtcactacgcatcattgtgattgagaagatcagcgatacgaaatattcgtagtactatcgataatttatttgaaaattcataagaaaagcaaacgttacatgaattgatgaaacaatacaaagacagataaagccacgcacatttaggatattggccgagattactgaatattgagtaagatcacggaatttctgacaggagcatgtcttcaattcagcccaaatggcagttgaaatactcaaaccgccccatatgcaggagcggatcattcattgtttgtttggttgcctttgccaacatgggagtccaaggttggcgcgccgaattcgcggccgcttaattaatcacgagtggatgactgtcacgactgactcatgactgactactagtgctagcctcgaggtcgacacaactttgtataataaagttgtctagtctgcttttacatgcgagacacatcttctaaagtaattttaataatagttactatattcaagatttcatatatcaaatactcaatattacttctaaaaaattaattagatataattaaaatattacttttttaattttaagtttaattgttgaatttgtgactattgatttattattctactatgtttaaattgttttatagatagtttaaagtaaatataagtaatgtagtagagtgttagagtgttaccctaaaccataaactataagatttatggtggactaattttcatatatttcttattgcttttaccttttcttggtatgtaagtccgtaactggaattactgtgggttgccatgacactctgtggtcttttggttcatgcatggatcttgcgcaagaaaaagacaaagaacaaagaaaaaagacaaaacagagagacaaaacgcaatcacacaaccaactcaaattagtcactggctgatcaagatcgccgcgtccatgtatgtctaaatgccatgcaaagcaacacgtgcttaacatgcactttaaatggctcacccatctcaacccacacacaaacacattgcctttttcttcatcatcaccacaaccacctgtatatattcattctcttccgccacctcaatttcttcacttcaacacacgtcaacctgcatatgcgtgtcatcccatgcccaaatctccatgcatgttccaaccaccttctctcttatataatacctataaatacctctaatatcactcacttctttcatcatccatccatccagagtactactactctactactataataccccaacccaactcatattcaatactactctaggatccacaaccaaaaatgcttcagcacacttggcttccgaagcctcccaatctgaccctcttgtcagatgaggttcatctctggaggattcctcttgaccagcctgagtcacaacttcaagaccttgctgccaccctgagcagtgatgaattggcgagggcaaacagattctactttccagaacacagaaggcgtttcactgctgggagaggcatcctcagatccatcttgggtggatacttgggagtggaaccgggtcaagtcaagtttgattatgagtcccgtgggaaaccgatccttggtgacagatttgctgagagtggactcctgttcaacttgtctcacagccagaaccttgccttgtgtgctgtcaactacacgcgtcaaataggcattgatcttgaatatctgcgtccaacatctgacttggagtctcttgcaaagaggttctttctcccaagagaatatgaactcttgaggtcactccctgatgagcagaaacagaagattttctttcgttactggacttgcaaagaggcttatctcaaagcaacgggagatggaatagccaaacttgaagagatcgagatagcactcaccccaacagaacctgccaagctccaaacagctcctgcgtggtctctgttggagcttgtgccagatgacaattgtgttgcagctgtggctgttgcgggttttggttggcagcccaagttctggcattactgagtagttagcttaatcacttaggtcacctcgagtatcaaaatctatttagaaatacacaatattttgttgcaggcttgctggagaatcgatctgctatcataaaaattacaaaaaaattttatttgcctcaattattttaggattggtattaaggacgcttaaattatttgtcgggtcactacgcatcattgtgattgagaagatcagcgatacgaaatattcgtagtactatcgataatttatttgaaaattcataagaaaagcaaacgttacatgaattgatgaaacaatacaaagacagataaagccacgcacatttaggatattggccgagattactgaatattgagtaagatcacggaatttctgacaggagcatgtcttcaattcagcccaaatggcagttgaaatactcaaaccgccccatatgcaggagcggatcattcattgtttgtttggttgcctttgccaacatgggagtccaaggttggcgcgccgaattcgcggccgcttaattaactactgtcactgaggccgtagacgagtacggactgatctaactagtgctagcctcgaggtcgacacccagcttt

SEQ ID NO: 50 - DNA, 47165 bp, Artificial sequence
  plasmid pDAB9323
gtacaaaaaagcaggcttctagacctagctaggtggagtcatcacgcagactatctcagcatgtgcgtagcacgcggccgcctcccagtatcattatagtgaaagttttggctctctcgccggtggttttttacctctatttaaaggggttttccacctaaaaattctggtatcattctcactttacttgttactttaatttctcataatctttggttgaaattatcacgcttccgcacacgatatccctacaaatttattatttgttaaacattttcaaaccgcataaaattttatgaagtcccgtctatctttaatgtagtctaacattttcatattgaaatatataatttacttaattttagcgttggtagaaagcataatgatttattcttattcttcttcatataaatgtttaatatacaatataaacaaattctttaccttaagaaggatttcccattttatattttaaaaatatatttatcaaatatttttcaaccacgtaaatctcataataataagttgtttcaaaagtaataaaatttaactccataatttttttattcgactgatcttaaagcaacacccagtgacacaactagccatttttttctttgaataaaaaaatccaattatcattgtattttttttatacaatgaaaatttcaccaaacaatgatttgtggtatttctgaagcaagtcatgttatgcaaaattctataattcccatttgacactacggaagtaactgaagatctgcttttacatgcgagacacatcttctaaagtaattttaataatagttactatattcaagatttcatatatcaaatactcaatattacttctaaaaaattaattagatataattaaaatattacttttttaattttaagtttaattgttgaatttgtgactattgatttattattctactatgtttaaattgttttatagatagtttaaagtaaatataagtaatgtagtagagtgttagagtgttaccctaaaccataaactataagatttatggtggactaattttcatatatttcttattgcttttaccttttcttggtatgtaagtccgtaactggaattactgtgggttgccatgacactctgtggtcttttggttcatgcatggatcttgcgcaagaaaaagacaaagaacaaagaaaaaagacaaaacagagagacaaaacgcaatcacacaaccaactcaaattagtcactggctgatcaagatcgccgcgtccatgtatgtctaaatgccatgcaaagcaacacgtgcttaacatgcactttaaatggctcacccatctcaacccacacacaaacacattgcctttttcttcatcatcaccacaaccacctgtatatattcattctcttccgccacctcaatttcttcacttcaacacacgtcaacctgcatatgcgtgtcatcccatgcccaaatctccatgcatgttccaaccaccttctctcttatataatacctataaatacctctaatatcactcacttctttcatcatccatccatccagagtactactactctactactataataccccaacccaactcatattcaatactactctaggatccacaaccaaaaatggcggcccgtctgcaggagcaaaagggaggcgagatggatacccgcattgccatcatcggcatgtcggccatcctcccctgcggcacgaccgtgcgcgagtcgtgggagaccatccgcgccggcatcgactgcctgtcggatctccccgaggaccgcgtcgacgtgacggcgtactttgaccccgtcaagaccaccaaggacaagatctactgcaagcgcggtggcttcattcccgagtacgactttgacgcccgcgagttcggactcaacatgttccagatggaggactcggacgcaaaccagaccatctcgcttctcaaggtcaaggaggccctccaggacgccggcatcgacgccctcggcaaggaaaagaagaacatcggctgcgtgctcggcattggcggcggccaaaagtccagccacgagttctactcgcgccttaattatgttgtcgtggagaaggtcctccgcaagatgggcatgcccgaggaggacgtcaaggtcgccgtcgaaaagtacaaggccaacttccccgagtggcgcctcgactccttccctggcttcctcggcaacgtcaccgccggtcgctgcaccaacaccttcaacctcgacggcatgaactgcgttgtcgacgccgcatgcgcctcgtccctcatcgccgtcaaggtcgccatcgacgagctgctctacggtgactgcgacatgatggtcaccggtgccacctgcacggataactccatcggcatgtacatggccttctccaagacccccgtgttctccacggaccccagcgtgcgcgcctacgacgaaaagacaaagggcatgctcatcggcgagggctccgccatgctcgtcctcaagcgctacgccgacgccgtccgcgacggcgatgagatccacgctgttattcgcggctgcgcctcctccagtgatggcaaggccgccggcatctacacgcccaccatttcgggccaggaggaggccctccgccgcgcctacaaccgcgcctgtgtcgacccggccaccgtcactctcgtcgagggtcacggcaccggtactcccgttggcgaccgcatcgagctcaccgccttgcgcaacctctttgacaaggcctacggcgagggcaacaccgaaaaggtcgctgtgggcagcatcaagtccagcatcggccatctcaaggccgtcgccggtctcgccggtatgatcaaggtcatcatggcgctcaagcacaagactctcccgggcaccatcaacgtcgacaacccacccaacctctacgacaacacgcccatcaacgagtcctcgctctacattaacaccatgaaccgcccctggttcccgccccctggtgtgccccgccgcgccggcatttcgagctttggctttggtggcgccaactaccacgccgtcctcgaggaggccgagcccgagcacacgaccgcgtaccgcctcaacaagcgcccgcagcccgtgctcatgatggccgccacgcccgcggccctccagtcgctctgcgaggcccagctcaaggagttcgaggccgccatcaaggagaacgagaccgtcaagaacaccgcctacatcaagtgcgtcaagttcggcgagcagttcaaattccctggctccatcccggccacaaacgcgcgcctcggcttcctcgtcaaggatgctgaggatgcctgctccaccctccgtgccatctgcgcccaattcgccaaggatgtcaccaaggaggcctggcgcctcccccgcgagggcgtcagcttccgcgccaagggcatcgccaccaacggcgctgtcgccgcgctcttctccggccagggcgcgcagtacacgcacatgtttagcgaggtggccatgaactggccccagttccgccagagcattgccgccatggacgccgcccagtccaaggtcgctggaagcgacaaggactttgagcgcgtctcccaggtcctctacccgcgcaagccgtacgagcgtgagcccgagcaggaccacaagaagatctccctcaccgcctactcgcagccctcgaccctggcctgcgctctcggtgcctttgagatcttcaaggaggccggcttcaccccggactttgccgccggccattcgctcggtgagttcgccgccctctacgccgcgggctgcgtcgaccgcgacgagctctttgagcttgtctgccgccgcgcccgcatcatgggcggcaaggacgcaccggccacccccaagggctgcatggccgccgtcattggccccaacgccgagaacatcaaggtccaggccgccaacgtctggctcggcaactccaactcgccttcgcagaccgtcatcaccggctccgtcgaaggtatccaggccgagagcgcccgcctccagaaggagggcttccgcgtcgtgcctcttgcctgcgagagcgccttccactcgccccagatggagaacgcctcgtcggccttcaaggacgtcatctccaaggtctccttccgcacccccaaggccgagaccaagctcttcagcaacgtctctggcgagacctaccccacggacgcccgcgagatgcttacgcagcacatgaccagcagcgtcaagttcctcacccaggtccgcaacatgcaccaggccggtgcgcgcatctttgtcgagttcggacccaagcaggtgctctccaagcttgtctccgagaccctcaaggatgacccctcggttgtcaccgtctctgtcaacccggcctcgggcacggattcggacatccagctccgcgacgcggccgtccagctcgttgtcgctggcgtcaaccttcagggctttgacaagtgggacgcccccgatgccacccgcatgcaggccatcaagaagaagcgcactaccctccgcctttcggccgccacctacgtctcggacaagaccaagaaggtccgcgacgccgccatgaacgatggccgctgcgtcacctacctcaagggcgccgcaccgctcatcaaggccccggagcccgttgtcgacgaggccgccaagcgcgaggccgagcgtctccagaaggagcttcaggatgcccagcgccagctcgacgacgccaagcgcgccgccgccgaggccaactccaagctcgccgctgccaaggaggaggccaagaccgccgctgcttcggccaagcccgcagttgacactgctgttgtcgaaaagcatcgtgccatcctcaagtccatgctcgcggagctcgatggctacggatcggtcgacgcttcttccctccagcagcagcagcagcagcagacggcccccgccccggtcaaggctgctgcgcctgccgcccccgttgcctcggcccctgccccggctgtctcgaacgagcttcttgagaaggccgagactgtcgtcatggaggtcctcgccgccaagaccggctacgagaccgacatgatcgaggctgacatggagctcgagaccgagctcggcattgactccatcaagcgtgtcgagatcctctccgaggtccaggccatgctcaatgtcgaggccaaggatgtcgatgccctcagccgcactcgcactgttggtgaggttgtcaacgccatgaaggccgagatcgctggcagctctgccccggcgcctgctgccgctgctccggctccggccaaggctgcccctgccgccgctgcgcctgctgtctcgaacgagcttctcgagaaggccgagaccgtcgtcatggaggtcctcgccgccaagactggctacgagactgacatgatcgagtccgacatggagctcgagactgagctcggcattgactccatcaagcgtgtcgagatcctctccgaggttcaggccatgctcaacgtcgaggccaaggacgtcgacgctctcagccgcactcgcactgtgggtgaggtcgtcaacgccatgaaggctgagatcgctggtggctctgccccggcgcctgccgccgctgccccaggtccggctgctgccgcccctgcgcctgccgccgccgcccctgctgtctcgaacgagcttcttgagaaggccgagaccgtcgtcatggaggtcctcgccgccaagactggctacgagactgacatgatcgagtccgacatggagctcgagaccgagctcggcattgactccatcaagcgtgtcgagattctctccgaggtccaggccatgctcaacgtcgaggccaaggacgtcgacgctctcagccgcacccgcactgttggcgaggtcgtcgatgccatgaaggccgagatcgctggtggctctgccccggcgcctgccgccgctgctcctgctccggctgctgccgcccctgcgcctgccgcccctgcgcctgctgtctcgagcgagcttctcgagaaggccgagactgtcgtcatggaggtcctcgccgccaagactggctacgagactgacatgatcgagtccgacatggagctcgagaccgagctcggcattgactccatcaagcgtgtcgagattctctccgaggtccaggccatgctcaacgtcgaggccaaggacgtcgacgctctcagccgcacccgcactgttggcgaggtcgtcgatgccatgaaggccgagatcgctggtggctctgccccggcgcctgccgccgctgctcctgctccggctgctgccgcccctgcgcctgccgcccctgcgcctgccgcccctgcgcctgctgtctcgagcgagcttctcgagaaggccgagactgtcgtcatggaggtcctcgccgccaagactggctacgagactgacatgattgagtccgacatggagctcgagaccgagctcggcattgactccatcaagcgtgtcgagattctctccgaggttcaggccatgctcaacgtcgaggccaaggacgtcgacgctctcagccgcactcgcactgttggtgaggtcgtcgatgccatgaaggctgagatcgctggcagctccgcctcggcgcctgccgccgctgctcctgctccggctgctgccgctcctgcgcccgctgccgccgcccctgctgtctcgaacgagcttctcgagaaagccgagactgtcgtcatggaggtcctcgccgccaagactggctacgagactgacatgatcgagtccgacatggagctcgagactgagctcggcattgactccatcaagcgtgtcgagatcctctccgaggttcaggccatgctcaacgtcgaggccaaggacgtcgatgccctcagccgcacccgcactgttggcgaggttgtcgatgccatgaaggccgagatcgctggtggctctgccccggcgcctgccgccgctgcccctgctccggctgccgccgcccctgctgtctcgaacgagcttctcgagaaggccgagactgtcgtcatggaggtcctcgccgccaagactggctacgagaccgacatgatcgagtccgacatggagctcgagaccgagctcggcattgactccatcaagcgtgtcgagattctctccgaggttcaggccatgctcaacgtcgaggccaaggacgtcgatgctctcagccgcactcgcactgttggcgaggtcgtcgatgccatgaaggctgagatcgccggcagctccgccccggcgcctgccgccgctgctcctgctccggctgctgccgctcctgcgcccgctgccgctgcccctgctgtctcgagcgagcttctcgagaaggccgagaccgtcgtcatggaggtcctcgccgccaagactggctacgagactgacatgattgagtccgacatggagctcgagactgagctcggcattgactccatcaagcgtgtcgagatcctctccgaggttcaggccatgctcaacgtcgaggccaaggacgtcgatgccctcagccgcacccgcactgttggcgaggttgtcgatgccatgaaggccgagatcgctggtggctctgccccggcgcctgccgccgctgcccctgctccggctgccgccgcccctgctgtctcgaacgagcttcttgagaaggccgagaccgtcgtcatggaggtcctcgccgccaagactggctacgagaccgacatgatcgagtccgacatggagctcgagaccgagctcggcattgactccatcaagcgtgtcgagattctctccgaggttcaggccatgctcaacgtcgaggccaaggacgtcgacgctctcagccgcactcgcactgttggcgaggtcgtcgatgccatgaaggctgagatcgctggtggctctgccccggcgcctgccgccgctgctcctgcctcggctggcgccgcgcctgcggtcaagattgactcggtccacggcgctgactgtgatgatctttccctgatgcacgccaaggtggttgacatccgccgcccggacgagctcatcctggagcgccccgagaaccgccccgttctcgttgtcgatgacggcagcgagctcaccctcgccctggtccgcgtcctcggcgcctgcgccgttgtcctgacctttgagggtctccagctcgctcagcgcgctggtgccgctgccatccgccacgtgctcgccaaggatctttccgcggagagcgccgagaaggccatcaaggaggccgagcagcgctttggcgctctcggcggcttcatctcgcagcaggcggagcgcttcgagcccgccgaaatcctcggcttcacgctcatgtgcgccaagttcgccaaggcttccctctgcacggctgtggctggcggccgcccggcctttatcggtgtggcgcgccttgacggccgcctcggattcacttcgcagggcacttctgacgcgctcaagcgtgcccagcgtggtgccatctttggcctctgcaagaccatcggcctcgagtggtccgagtctgacgtcttttcccgcggcgtggacattgctcagggcatgcaccccgaggatgccgccgtggcgattgtgcgcgagatggcgtgcgctgacattcgcattcgcgaggtcggcattggcgcaaaccagcagcgctgcacgatccgtgccgccaagctcgagaccggcaacccgcagcgccagatcgccaaggacgacgtgctgctcgtttctggcggcgctcgcggcatcacgcctctttgcatccgggagatcacgcgccagatcgcgggcggcaagtacattctgcttggccgcagcaaggtctctgcgagcgaaccggcatggtgcgctggcatcactgacgagaaggctgtgcaaaaggctgctacccaggagctcaagcgcgcctttagcgctggcgagggccccaagcccacgccccgcgctgtcactaagcttgtgggctctgttcttggcgctcgcgaggtgcgcagctctattgctgcgattgaagcgctcggcggcaaggccatctactcgtcgtgcgacgtgaactctgccgccgacgtggccaaggccgtgcgcgatgccgagtcccagctcggtgcccgcgtctcgggcatcgttcatgcctcgggcgtgctccgcgaccgtctcatcgagaagaagctccccgacgagttcgacgccgtctttggcaccaaggtcaccggtctcgagaacctcctcgccgccgtcgaccgcgccaacctcaagcacatggtcctcttcagctcgctcgccggcttccacggcaacgtcggccagtctgactacgccatggccaacgaggcccttaacaagatgggcctcgagctcgccaaggacgtctcggtcaagtcgatctgcttcggtccctgggacggtggcatggtgacgccgcagctcaagaagcagttccaggagatgggcgtgcagatcatcccccgcgagggcggcgctgataccgtggcgcgcatcgtgctcggctcctcgccggctgagatccttgtcggcaactggcgcaccccgtccaagaaggtcggctcggacaccatcaccctgcaccgcaagatttccgccaagtccaaccccttcctcgaggaccacgtcatccagggccgccgcgtgctgcccatgacgctggccattggctcgctcgcggagacctgcctcggcctcttccccggctactcgctctgggccattgacgacgcccagctcttcaagggtgtcactgtcgacggcgacgtcaactgcgaggtgaccctcaccccgtcgacggcgccctcgggccgcgtcaacgtccaggccacgctcaagaccttttccagcggcaagctggtcccggcctaccgcgccgtcatcgtgctctccaaccagggcgcgcccccggccaacgccaccatgcagccgccctcgctcgatgccgatccggcgctccagggctccgtctacgacggcaagaccctcttccacggcccggccttccgcggcatcgatgacgtgctctcgtgcaccaagagccagcttgtggccaagtgcagcgctgtccccggctccgacgccgctcgcggcgagtttgccacggacactgacgcccatgaccccttcgtgaacgacctggcctttcaggccatgctcgtctgggtgcgccgcacgctcggccaggctgcgctccccaactcgatccagcgcatcgtccagcaccgcccggtcccgcaggacaagcccttctacattaccctccgctccaaccagtcgggcggtcactcccagcacaagcacgcccttcagttccacaacgagcagggcgatctcttcattgatgtccaggcttcggtcatcgccacggacagccttgccttctaaatctaaactaggccatggtgacttaaggtagttagcttaatcacttaggtcaccagtatgaactaaaatgcatgtaggtgtaagagctcatggagagcatggaatattgtatccgaccatgtaacagtataataactgagctccatctcacttcttctatgaataaacaaaggatgttatgatatattaacactctatctatgcaccttattgttctatgataaatttcctcttattattataaatcatctgaatcgtgacggcttatggaatgcttcaaatagtacaaaaacaaatgtgtactataagactttctaaacaattctaactttagcattgtgaacgagacataagtgttaagaagacataacaattataatggaagaagtttgtctccatttatatattatatattacccacttatgtattatattaggatgttaaggagacataacaattataaagagagaagtttgtatccatttatatattatatactacccatttatatattatacttatccacttatttaatgtctttataaggtttgatccatgatatttctaatattttagttgatatgtatatgaaaaggtactatttgaactctcttactctgtataaaggttggatcatccttaaagtgggtctatttaattttattgcttcttacagataaaaaaaaaattatgagttggtttgataaaatattgaaggatttaaaataataataaataataaataacatataatatatgtatataaatttattataatataacatttatctataaaaaagtaaatattgtcataaatctatacaatcgtttagccttgctggaacgaatctcaattatttaaacgagagtaaacatatttgactttttggttatttaacaaattattatttaacactatatgaaattttttttttttatcagcaaagaataaaattaaattaagaaggacaatggtgtcccaatccttatacaaccaacttccacaagaaagtcaagtcagagacaacaaaaaaacaagcaaaggaaattttttaatttgagttgtcttgtttgctgcataatttatgcagtaaaacactacacataacccttttagcagtagagcaatggttgaccgtgtgcttagcttcttttattttatttttttatcagcaaagaataaataaaataaaatgagacacttcagggatgtttcaacccttatacaaaaccccaaaaacaagtttcctagcaccctaccaacgaattcgcggccgcttaattaagatgagtgatactcaggactcaggactcactctgctgatcactagtgctagcctcgaggtcgacacaactttgtatacaaaagttgtctagacctaggctcagcaactcatccagtcaagttcgagtcagtgagttgggcggccgcctcccagtatcattatagtgaaagttttggctctctcgccggtggttttttacctctatttaaaggggttttccacctaaaaattctggtatcattctcactttacttgttactttaatttctcataatctttggttgaaattatcacgcttccgcacacgatatccctacaaatttattatttgttaaacattttcaaaccgcataaaattttatgaagtcccgtctatctttaatgtagtctaacattttcatattgaaatatataatttacttaattttagcgttggtagaaagcataatgatttattcttattcttcttcatataaatgtttaatatacaatataaacaaattctttaccttaagaaggatttcccattttatattttaaaaatatatttatcaaatatttttcaaccacgtaaatctcataataataagttgtttcaaaagtaataaaatttaactccataatttttttattcgactgatcttaaagcaacacccagtgacacaactagccatttttttctttgaataaaaaaatccaattatcattgtattttttttatacaatgaaaatttcaccaaacaatgatttgtggtatttctgaagcaagtcatgttatgcaaaattctataattcccatttgacactacggaagtaactgaagatctgcttttacatgcgagacacatcttctaaagtaattttaataatagttactatattcaagatttcatatatcaaatactcaatattacttctaaaaaattaattagatataattaaaatattacttttttaattttaagtttaattgttgaatttgtgactattgatttattattctactatgtttaaattgttttatagatagtttaaagtaaatataagtaatgtagtagagtgttagagtgttaccctaaaccataaactataagatttatggtggactaattttcatatatttcttattgcttttaccttttcttggtatgtaagtccgtaactggaattactgtgggttgccatgacactctgtggtcttttggttcatgcatggatcttgcgcaagaaaaagacaaagaacaaagaaaaaagacaaaacagagagacaaaacgcaatcacacaaccaactcaaattagtcactggctgatcaagatcgccgcgtccatgtatgtctaaatgccatgcaaagcaacacgtgcttaacatgcactttaaatggctcacccatctcaacccacacacaaacacattgcctttttcttcatcatcaccacaaccacctgtatatattcattctcttccgccacctcaatttcttcacttcaacacacgtcaacctgcatatgcgtgtcatcccatgcccaaatctccatgcatgttccaaccaccttctctcttatataatacctataaatacctctaatatcactcacttctttcatcatccatccatccagagtactactactctactactataataccccaacccaactcatattcaatactactctaggatccggccatctaggccggatccacaaccaaaaatggccgctcgcaacgtgtctgcagcgcatgagatgcacgatgaaaagcgcatcgccgtcgtcggcatggccgtccagtacgccggatgcaaaaccaaggacgagttctgggaggtgctcatgaacggcaaggtcgagtccaaggtgatcagcgacaaacgactcggctccaactaccgcgccgagcactacaaagcagagcgcagcaagtatgccgacaccttttgcaacgaaacgtacggcacccttgacgagaacgagatcgacaacgagcacgaactcctcctcaacctcgccaagcaggcactcgcagagacatccgtcaaagactcgacacgctgcggcatcgtcagcggctgcctctcgttccccatggacaacctccagggtgaactcctcaacgtgtaccaaaaccatgtcgagaaaaagctcggggcccgcgtcttcaaggacgcctcccattggtccgaacgcgagcagtccaacaaacccgaggccggtgaccgccgcatcttcatggacccggcctccttcgtcgccgaagaactcaacctcggcgcccttcactactccgtcgacgcagcatgcgccacggcgctctacgtgctccgcctcgcgcaggatcatctcgtctccggcgccgccgacgtcatgctctgcggtgccacctgcctgccggagccctttttcatcctttcgggcttttccaccttccaggccatgcccgtcggcacgggccagaacgtgtccatgccgctgcacaaggacagccagggcctcaccccgggtgagggcggctccatcatggtcctcaagcgtctcgatgatgccatccgcgacggcgaccacatctacggcacccttctcggcgccaatgtcagcaactccggcacaggtctgcccctcaagccccttctccccagcgagaaaaagtgcctcatggacacctacacgcgcattaacgtgcacccgcacaagattcagtacgtcgagtgccacgccaccggcacgccccagggtgatcgtgtggaaatcgacgccgtcaaggcctgctttgaaggcaaggtcccccgtttcggtaccacaaagggcaactttggacacaccctcgtcgcagccggctttgccggtatgtgcaaggtcctcctctccatgaagcatggcatcatcccgcccaccccgggtatcgatgacgagaccaagatggaccctctcgtcgtctccggtgaggccatcccatggccagagaccaacggcgagcccaagcgcgccggtctctcggcctttggctttggtggcaccaacgcccatgccgtctttgaggagcatgacccctccaacgccgcctgcacgggccacgactccatttctgcgctctcggcccgctgcggcggtgaaagcaacatgcgcatcgccatcactggtatggacgccacctttggcgctctcaagggactcgacgccttcgagcgcgccatttacaccggcgctcacggtgccatcccactcccagaaaagcgctggcgctttctcggcaaggacaaggactttcttgacctctgcggcgtcaaggccaccccgcacggctgctacattgaagatgttgaggtcgacttccagcgcctccgcacgcccatgacccctgaagacatgctcctccctcagcagcttctggccgtcaccaccattgaccgcgccatcctcgactcgggaatgaaaaagggtggcaatgtcgccgtctttgtcggcctcggcaccgacctcgagctctaccgtcaccgtgctcgcgtcgctctcaaggagcgcgtccgccctgaagcctccaagaagctcaatgacatgatgcagtacattaacgactgcggcacatccacatcgtacacctcgtacattggcaacctcgtcgccacgcgcgtctcgtcgcagtggggcttcacgggcccctcctttacgatcaccgagggcaacaactccgtctaccgctgcgccgagctcggcaagtacctcctcgagaccggcgaggtcgatggcgtcgtcgttgcgggtgtcgatctctgcggcagtgccgaaaacctttacgtcaagtctcgccgcttcaaggtgtccacctccgataccccgcgcgccagctttgacgccgccgccgatggctactttgtcggcgagggctgcggtgcctttgtgctcaagcgtgagactagctgcaccaaggacgaccgtatctacgcttgcatggatgccatcgtccctggcaacgtccctagcgcctgcttgcgcgaggccctcgaccaggcgcgcgtcaagccgggcgatatcgagatgctcgagctcagcgccgactccgcccgccacctcaaggacccgtccgtcctgcccaaggagctcactgccgaggaggaaatcggcggccttcagacgatccttcgtgacgatgacaagctcccgcgcaacgtcgcaacgggcagtgtcaaggccaccgtcggtgacaccggttatgcctctggtgctgccagcctcatcaaggctgcgctttgcatctacaaccgctacctgcccagcaacggcgacgactgggatgaacccgcccctgaggcgccctgggacagcaccctctttgcgtgccagacctcgcgcgcttggctcaagaaccctggcgagcgtcgctatgcggccgtctcgggcgtctccgagacgcgctcgtgctattccgtgctcctctccgaagccgagggccactacgagcgcgagaaccgcatctcgctcgacgaggaggcgcccaagctcattgtgcttcgcgccgactcccacgaggagatccttggtcgcctcgacaagatccgcgagcgcttcttgcagcccacgggcgccgccccgcgcgagtccgagctcaaggcgcaggcccgccgcatcttcctcgagctcctcggcgagacccttgcccaggatgccgcttcttcaggctcgcaaaagcccctcgctctcagcctcgtctccacgccctccaagctccagcgcgaggtcgagctcgcggccaagggtatcccgcgctgcctcaagatgcgccgcgattggagctcccctgctggcagccgctacgcgcctgagccgctcgccagcgaccgcgtcgccttcatgtacggcgaaggtcgcagcccttactacggcatcacccaagacattcaccgcatttggcccgaactccacgaggtcatcaacgaaaagacgaaccgtctctgggccgaaggcgaccgctgggtcatgccgcgcgccagcttcaagtcggagctcgagagccagcagcaagagtttgatcgcaacatgattgaaatgttccgtcttggaatcctcacctcaattgccttcaccaatctggcgcgcgacgttctcaacatcacgcccaaggccgcctttggcctcagtcttggcgagatttccatgatttttgccttttccaagaagaacggtctcatctccgaccagctcaccaaggatcttcgcgagtccgacgtgtggaacaaggctctggccgttgaatttaatgcgctgcgcgaggcctggggcattccacagagtgtccccaaggacgagttctggcaaggctacattgtgcgcggcaccaagcaggatatcgaggcggccatcgccccggacagcaagtacgtgcgcctcaccatcatcaatgatgccaacaccgccctcattagcggcaagcccgacgcctgcaaggctgcgatcgcgcgtctcggtggcaacattcctgcgcttcccgtgacccagggcatgtgcggccactgccccgaggtgggaccttataccaaggatatcgccaagatccatgccaaccttgagttccccgttgtcgacggccttgacctctggaccacaatcaaccagaagcgcctcgtgccacgcgccacgggcgccaaggacgaatgggccccttcttcctttggcgagtacgccggccagctctacgagaagcaggctaacttcccccaaatcgtcgagaccatttacaagcaaaactacgacgtctttgtcgaggttgggcccaacaaccaccgtagcaccgcagtgcgcaccacgcttggtccccagcgcaaccaccttgctggcgccatcgacaagcagaacgaggatgcttggacgaccatcgtcaagcttgtggcttcgctcaaggcccaccttgttcctggcgtcacgatctcgccgctgtaccactccaagcttgtggcggaggctgaggcttgctacgctgcgctctgcaagggtgaaaagcccaagaagaacaagtttgtgcgcaagattcagctcaacggtcgcttcaacagcaaggcggaccccatctcctcggccgatcttgccagctttccgcctgcggaccctgccattgaagccgccatctcgagccgcatcatgaagccggttgctccgaagttctacgcgcgtctcaacattgacgagcaggacgagacccgtgatccgatcctcaacaaggacaacgcgccgtcttccagctctagctcctcttccagctcttccagctcttccagcccgtcgccagctccgtccgccccagtgcaaaagaaggctgctccggccgcggagaccaaggctgttgcttcggctgacgcacttcgcagtgccctgctcgatctcgacagtatgcttgcgctgagctctgccagtgcctccggcaaccttgttgagactgcgcctagcgacgcctcggtcattgtgccgccctgcaacattgcggatctcggcagccgcgccttcatgaaaacgtacggtgtttcggcgcctctgtacacgggcgccatggccaagggcattgcctctgcggacctcgtcattgccgccggccgccagggcatccttgcgtcctttggcgccggcggacttcccatgcaggttgtgcgtgagtccatcgaaaagattcaggccgccctgcccaatggcccgtacgctgtcaaccttatccattctccctttgacagcaacctcgaaaagggcaatgtcgatctcttcctcgagaagggtgtcacctttgtcgaggcctcggcctttatgacgctcaccccgcaggtcgtgcggtaccgcgcggctggcctcacgcgcaacgccgacggctcggtcaacatccgcaaccgtatcattggcaaggtctcgcgcaccgagctcgccgagatgttcatgcgtcctgcgcccgagcaccttcttcagaagctcattgcttccggcgagatcaaccaggagcaggccgagctcgcccgccgtgttcccgtcgctgacgacatcgcggtcgaagctgactcgggtggccacaccgacaaccgccccatccacgtcattctgcccctcatcatcaaccttcgcgaccgccttcaccgcgagtgcggctacccggccaaccttcgcgtccgtgtgggcgccggcggtggcattgggtgcccccaggcggcgctggccaccttcaacatgggtgcctcctttattgtcaccggcaccgtgaaccaggtcgccaagcagtcgggcacgtgcgacaatgtgcgcaagcagctcgcgaaggccacttactcggacgtatgcatggccccggctgccgacatgttcgaggaaggcgtcaagcttcaggtcctcaagaagggaaccatgtttccctcgcgcgccaacaagctctacgagctcttttgcaagtacgactcgttcgagtccatgccccccgcagagcttgcgcgcgtcgagaagcgcatcttcagccgcgcgctcgaagaggtctgggacgagaccaaaaacttttacattaaccgtcttcacaacccggagaagatccagcgcgccgagcgcgaccccaagctcaagatgtcgctgtgctttcgctggtacctgagcctggcgagccgctgggccaacactggagcttccgatcgcgtcatggactaccaggtctggtgcggtcctgccattggttccttcaacgatttcatcaagggaacttaccttgatccggccgtcgcaaacgagtacccgtgcgtcgttcagattaacaagcagatccttcgtggagcgtgcttcttgcgccgtctcgaaattctgcgcaacgcacgcctttccgatggcgctgccgctcttgtggccagcatcgatgacacatacgtcccggccgagaagctgtgagtagttagcttaatcacttaggtcaccggcctagtaggccggtcaccagtatgaactaaaatgcatgtaggtgtaagagctcatggagagcatggaatattgtatccgaccatgtaacagtataataactgagctccatctcacttcttctatgaataaacaaaggatgttatgatatattaacactctatctatgcaccttattgttctatgataaatttcctcttattattataaatcatctgaatcgtgacggcttatggaatgcttcaaatagtacaaaaacaaatgtgtactataagactttctaaacaattctaactttagcattgtgaacgagacataagtgttaagaagacataacaattataatggaagaagtttgtctccatttatatattatatattacccacttatgtattatattaggatgttaaggagacataacaattataaagagagaagtttgtatccatttatatattatatactacccatttatatattatacttatccacttatttaatgtctttataaggtttgatccatgatatttctaatattttagttgatatgtatatgaaaaggtactatttgaactctcttactctgtataaaggttggatcatccttaaagtgggtctatttaattttattgcttcttacagataaaaaaaaaattatgagttggtttgataaaatattgaaggatttaaaataataataaataataaataacatataatatatgtatataaatttattataatataacatttatctataaaaaagtaaatattgtcataaatctatacaatcgtttagccttgctggaacgaatctcaattatttaaacgagagtaaacatatttgactttttggttatttaacaaattattatttaacactatatgaaattttttttttttatcagcaaagaataaaattaaattaagaaggacaatggtgtcccaatccttatacaaccaacttccacaagaaagtcaagtcagagacaacaaaaaaacaagcaaaggaaattttttaatttgagttgtcttgtttgctgcataatttatgcagtaaaacactacacataacccttttagcagtagagcaatggttgaccgtgtgcttagcttcttttattttatttttttatcagcaaagaataaataaaataaaatgagacacttcagggatgtttcaacccttatacaaaaccccaaaaacaagtttcctagcaccctaccaacgaattcgcggccgcttaattaatctgacctgaccactagacctgagtgagtacagatgtgctactagtgctagcctcgaggtcgaccaacttttctatacaaagttgtctagacctaggactaggcactgagtgactcactgacctgactgagtgactggcggccgcctcccagtatcattatagtgaaagttttggctctctcgccggtggttttttacctctatttaaaggggttttccacctaaaaattctggtatcattctcactttacttgttactttaatttctcataatctttggttgaaattatcacgcttccgcacacgatatccctacaaatttattatttgttaaacattttcaaaccgcataaaattttatgaagtcccgtctatctttaatgtagtctaacattttcatattgaaatatataatttacttaattttagcgttggtagaaagcataatgatttattcttattcttcttcatataaatgtttaatatacaatataaacaaattctttaccttaagaaggatttcccattttatattttaaaaatatatttatcaaatatttttcaaccacgtaaatctcataataataagttgtttcaaaagtaataaaatttaactccataatttttttattcgactgatcttaaagcaacacccagtgacacaactagccatttttttctttgaataaaaaaatccaattatcattgtattttttttatacaatgaaaatttcaccaaacaatgatttgtggtatttctgaagcaagtcatgttatgcaaaattctataattcccatttgacactacggaagtaactgaagatctgcttttacatgcgagacacatcttctaaagtaattttaataatagttactatattcaagatttcatatatcaaatactcaatattacttctaaaaaattaattagatataattaaaatattacttttttaattttaagtttaattgttgaatttgtgactattgatttattattctactatgtttaaattgttttatagatagtttaaagtaaatataagtaatgtagtagagtgttagagtgttaccctaaaccataaactataagatttatggtggactaattttcatatatttcttattgcttttaccttttcttggtatgtaagtccgtaactggaattactgtgggttgccatgacactctgtggtcttttggttcatgcatggatcttgcgcaagaaaaagacaaagaacaaagaaaaaagacaaaacagagagacaaaacgcaatcacacaaccaactcaaattagtcactggctgatcaagatcgccgcgtccatgtatgtctaaatgccatgcaaagcaacacgtgcttaacatgcactttaaatggctcacccatctcaacccacacacaaacacattgcctttttcttcatcatcaccacaaccacctgtatatattcattctcttccgccacctcaatttcttcacttcaacacacgtcaacctgcatatgcgtgtcatcccatgcccaaatctccatgcatgttccaaccaccttctctcttatataatacctataaatacctctaatatcactcacttctttcatcatccatccatccagagtactactactctactactataataccccaacccaactcatattcaatactactctaggatccggccatctaggccggatccacaaccaaaaatggcgctccgtgtcaagacgaacaagaagccatgctgggagatgaccaaggaggagctgaccagcggcaagaccgaggtgttcaactatgaggaactcctcgagttcgcagagggcgacatcgccaaggtcttcggacccgagttcgccgtcatcgacaagtacccgcgccgcgtgcgcctgcccgcccgcgagtacctgctcgtgacccgcgtcaccctcatggacgccgaggtcaacaactaccgcgtcggcgcccgcatggtcaccgagtacgatctccccgtcaacggagagctctccgagggcggagactgcccctgggccgtcctggtcgagagtggccagtgcgatctcatgctcatctcctacatgggcattgacttccagaaccagggcgaccgcgtctaccgcctgctcaacaccacgctcaccttttacggcgtggcccacgagggcgagaccctcgagtacgacattcgcgtcaccggcttcgccaagcgtctcgacggcggcatctccatgttcttcttcgagtacgactgctacgtcaacggccgcctcctcatcgagatgcgcgatggctgcgccggcttcttcaccaacgaggagctcgacgccggcaagggcgtcgtcttcacccgcggcgacctcgccgcccgcgccaagatcccaaagcaggacgtctccccctacgccgtcgccccctgcctccacaagaccaagctcaacgaaaaggagatgcagaccctcgtcgacaaggactgggcatccgtctttggctccaagaacggcatgccggaaatcaactacaaactctgcgcgcgtaagatgctcatgattgaccgcgtcaccagcattgaccacaagggcggtgtctacggcctcggtcagctcgtcggtgaaaagatcctcgagcgcgaccactggtactttccctgccactttgtcaaggatcaggtcatggccggatccctcgtctccgacggctgcagccagatgctcaagatgtacatgatctggctcggcctccacctcaccaccggaccctttgacttccgcccggtcaacggccaccccaacaaggtccgctgccgcggccaaatctccccgcacaagggcaagctcgtctacgtcatggagatcaaggagatgggcttcgacgaggacaacgacccgtacgccattgccgacgtcaacatcattgatgtcgacttcgaaaagggccaggactttagcctcgaccgcatcagcgactacggcaagggcgacctcaacaagaagatcgtcgtcgactttaagggcatcgctctcaagatgcagaagcgctccaccaacaagaacccctccaaggttcagcccgtctttgccaacggcgccgccactgtcggccccgaggcctccaaggcttcctccggcgccagcgccagcgccagcgccgccccggccaagcctgccttcagcgccgatgttcttgcgcccaagcccgttgcccttcccgagcacatcctcaagggcgacgccctcgcccccaaggagatgtcctggcaccccatggcccgcatcccgggcaacccgacgccctcttttgcgccctcggcctacaagccgcgcaacatcgcctttacgcccttccccggcaaccccaacgataacgaccacaccccgggcaagatgccgctcacctggttcaacatggccgagttcatggccggcaaggtcagcatgtgcctcggccccgagttcgccaagttcgacgactcgaacaccagccgcagccccgcttgggacctcgctctcgtcacccgcgccgtgtctgtgtctgacctcaagcacgtcaactaccgcaacatcgacctcgacccctccaagggtaccatggtcggcgagttcgactgccccgcggacgcctggttctacaagggcgcctgcaacgatgcccacatgccgtactcgatcctcatggagatcgccctccagacctcgggtgtgctcacctcggtgctcaaggcgcccctgaccatggagaaggacgacatcctcttccgcaacctcgacgccaacgccgagttcgtgcgcgccgacctcgactaccgcggcaagactatccgcaacgtcaccaagtgcactggctacagcatgctcggcgagatgggcgtccaccgcttcacctttgagctctacgtcgatgatgtgctcttttacaagggctcgacctcgttcggctggttcgtgcccgaggtctttgccgcccaggccggcctcgacaacggccgcaagtcggagccctggttcattgagaacaaggttccggcctcgcaggtctcctcctttgacgtgcgccccaacggcagcggccgcaccgccatcttcgccaacgcccccagcggcgcccagctcaaccgccgcacggaccagggccagtacctcgacgccgtcgacattgtctccggcagcggcaagaagagcctcggctacgcccacggttccaagacggtcaacccgaacgactggttcttctcgtgccacttttggtttgactcggtcatgcccggaagtctcggtgtcgagtccatgttccagctcgtcgaggccatcgccgcccacgaggatctcgctggcaagcacggcattgccaaccccacctttgtgcacgccccgggcaagatcagctggaagtaccgcggccagctcacgcccaagagcaagaagatggactcggaggtccacatcgtgtccgtggacgcccacgacggcgttgtcgacctcgtcgccgacggcttcctctgggccgacagcctccgcgtctactcggtgagcaacattcgcgtgcgcatcgcctccggtgaggcccctgccgccgcctcctccgccgcctctgtgggctcctcggcttcgtccgtcgagcgcacgcgctcgagccccgctgtcgcctccggcccggcccagaccatcgacctcaagcagctcaagaccgagctcctcgagctcgatgccccgctctacctctcgcaggacccgaccagcggccagctcaagaagcacaccgacgtggcctccggccaggccaccatcgtgcagccctgcacgctcggcgacctcggtgaccgctccttcatggagacctacggcgtcgtcgccccgctgtacacgggcgccatggccaagggcattgcctcggcggacctcgtcatcgccgccggcaagcgcaagatcctcggctcctttggcgccggcggcctccccatgcaccacgtgcgcgccgccctcgagaagatccaggccgccctgcctcagggcccctacgccgtcaacctcatccactcgccttttgacagcaacctcgagaagggcaacgtcgatctcttcctcgagaagggcgtcactgtggtggaggcctcggcattcatgaccctcaccccgcaggtcgtgcgctaccgcgccgccggcctctcgcgcaacgccgacggttcggtcaacatccgcaaccgcatcatcggcaaggtctcgcgcaccgagctcgccgagatgttcatccgcccggccccggagcacctcctcgagaagctcatcgcctcgggcgagatcacccaggagcaggccgagctcgcgcgccgcgttcccgtcgccgacgatatcgctgtcgaggctgactcgggcggccacaccgacaaccgccccatccacgtcatcctcccgctcatcatcaacctccgcaaccgcctgcaccgcgagtgcggctaccccgcgcacctccgcgtccgcgttggcgccggcggtggcgtcggctgcccgcaggccgccgccgccgcgctcaccatgggcgccgccttcatcgtcaccggcactgtcaaccaggtcgccaagcagtccggcacctgcgacaacgtgcgcaagcagctctcgcaggccacctactcggatatctgcatggccccggccgccgacatgttcgaggagggcgtcaagctccaggtcctcaagaagggaaccatgttcccctcgcgcgccaacaagctctacgagctcttttgcaagtacgactccttcgactccatgcctcctgccgagctcgagcgcatcgagaagcgtatcttcaagcgcgcactccaggaggtctgggaggagaccaaggacttttacattaacggtctcaagaacccggagaagatccagcgcgccgagcacgaccccaagctcaagatgtcgctctgcttccgctggtaccttggtcttgccagccgctgggccaacatgggcgccccggaccgcgtcatggactaccaggtctggtgtggcccggccattggcgccttcaacgacttcatcaagggcacctacctcgaccccgctgtctccaacgagtacccctgtgtcgtccagatcaacctgcaaatcctccgtggtgcctgctacctgcgccgtctcaacgccctgcgcaacgacccgcgcattgacctcgagaccgaggatgctgcctttgtctacgagcccaccaacgcgctctaatgagtagttagcttaatcacttaggtcaccggcctagtaggccggtcaccagtatgaactaaaatgcatgtaggtgtaagagctcatggagagcatggaatattgtatccgaccatgtaacagtataataactgagctccatctcacttcttctatgaataaacaaaggatgttatgatatattaacactctatctatgcaccttattgttctatgataaatttcctcttattattataaatcatctgaatcgtgacggcttatggaatgcttcaaatagtacaaaaacaaatgtgtactataagactttctaaacaattctaactttagcattgtgaacgagacataagtgttaagaagacataacaattataatggaagaagtttgtctccatttatatattatatattacccacttatgtattatattaggatgttaaggagacataacaattataaagagagaagtttgtatccatttatatattatatactacccatttatatattatacttatccacttatttaatgtctttataaggtttgatccatgatatttctaatattttagttgatatgtatatgaaaaggtactatttgaactctcttactctgtataaaggttggatcatccttaaagtgggtctatttaattttattgcttcttacagataaaaaaaaaattatgagttggtttgataaaatattgaaggatttaaaataataataaataataaataacatataatatatgtatataaatttattataatataacatttatctataaaaaagtaaatattgtcataaatctatacaatcgtttagccttgctggaacgaatctcaattatttaaacgagagtaaacatatttgactttttggttatttaacaaattattatttaacactatatgaaattttttttttttatcagcaaagaataaaattaaattaagaaggacaatggtgtcccaatccttatacaaccaacttccacaagaaagtcaagtcagagacaacaaaaaaacaagcaaaggaaattttttaatttgagttgtcttgtttgctgcataatttatgcagtaaaacactacacataacccttttagcagtagagcaatggttgaccgtgtgcttagcttcttttattttatttttttatcagcaaagaataaataaaataaaatgagacacttcagggatgtttcaacccttatacaaaaccccaaaaacaagtttcctagcaccctaccaacgaattcgcggccgcttaattaatcacgagtggatgactgtcacgactgactcatgactgactactagtgctagcctcgaggtcgacacaactttgtataataaagttgtctagacctaggcgagtcatgagtcgtgacatgacgtcatgctcatcagactgcggccgcctcccagtatcattatagtgaaagttttggctctctcgccggtggttttttacctctatttaaaggggttttccacctaaaaattctggtatcattctcactttacttgttactttaatttctcataatctttggttgaaattatcacgcttccgcacacgatatccctacaaatttattatttgttaaacattttcaaaccgcataaaattttatgaagtcccgtctatctttaatgtagtctaacattttcatattgaaatatataatttacttaattttagcgttggtagaaagcataatgatttattcttattcttcttcatataaatgtttaatatacaatataaacaaattctttaccttaagaaggatttcccattttatattttaaaaatatatttatcaaatatttttcaaccacgtaaatctcataataataagttgtttcaaaagtaataaaatttaactccataatttttttattcgactgatcttaaagcaacacccagtgacacaactagccatttttttctttgaataaaaaaatccaattatcattgtattttttttatacaatgaaaatttcaccaaacaatgatttgtggtatttctgaagcaagtcatgttatgcaaaattctataattcccatttgacactacggaagtaactgaagatctgcttttacatgcgagacacatcttctaaagtaattttaataatagttactatattcaagatttcatatatcaaatactcaatattacttctaaaaaattaattagatataattaaaatattacttttttaattttaagtttaattgttgaatttgtgactattgatttattattctactatgtttaaattgttttatagatagtttaaagtaaatataagtaatgtagtagagtgttagagtgttaccctaaaccataaactataagatttatggtggactaattttcatatatttcttattgcttttaccttttcttggtatgtaagtccgtaactggaattactgtgggttgccatgacactctgtggtcttttggttcatgcatggatcttgcgcaagaaaaagacaaagaacaaagaaaaaagacaaaacagagagacaaaacgcaatcacacaaccaactcaaattagtcactggctgatcaagatcgccgcgtccatgtatgtctaaatgccatgcaaagcaacacgtgcttaacatgcactttaaatggctcacccatctcaacccacacacaaacacattgcctttttcttcatcatcaccacaaccacctgtatatattcattctcttccgccacctcaatttcttcacttcaacacacgtcaacctgcatatgcgtgtcatcccatgcccaaatctccatgcatgttccaaccaccttctctcttatataatacctataaatacctctaatatcactcacttctttcatcatccatccatccagagtactactactctactactataataccccaacccaactcatattcaatactactctaggatccggccatctaggccggatccacaaccaaaaatggctcccactcccgacgccaccgcgcctctgaacaagccgagcgactatgccgtctaccacgaggaagacggccccttctggaccgccgattccagcggcgtctcgcgcgtgaactttagcgagaccggcgtgggatccgagggcgtcatccctgcgctcacgctcatcgacgtcttcgagagggccgtcaagcgcggcggaaacaggatcgccttccgcacggaaaacatgcccacgctccgccgcggcgaagaggccccggacgcgctgccgctcaaggactggaagtcctggtcctggaaacagtacaaggccgacgtccaccgcatcgccagggctctcatggacctcggcgttgagcagcatgacgccgtctccatttttggctttaactcgcccgaatggtttctcagtgccgtcggcgccgtgcacgcaggtgccaagattgccggcatttacccctcagacacgcccgcccaggtccagtacaaggccttccacagtgacaccgctgttgccgttgtcgaaaacgagcagtgcttcaagaagttcgccgaggtcgtcgaggaccttccttacctcaaggccattgtttgctgggactatgaagccacagacatcacgcgcgaggacggctccgtcgtcgaggtcctcacctttgccgagttcctcaagcgcggcgacaccgtcgaggcggccgcccttgacgagcgcatctccaagatcgagcccaccatgtgcgctgcccttatttacaccagcggtactaccggccgccccaaggccgttatgatttcgcacgacaaccttgttttcgaggccagcgccgtcgtccccaacctcggaggagcctgtacgaccactgctgaggagcgcattctctcgtacctgcctctctcgcacgtcgctggtatgatggttgatattattgcccccatcattgccaccgccttccacaagggccgcatctgcgtctgctttgctcgcccgtacgatttgcgcaccggcacgctgggccagcgcctcaacgccgtggagcccaccatcttccttggcgtgccccgtgtgtgggaaaagattcaggaaaagctcatggccgtcggtgccaaaaccaccggcctcaagaagaagctctctacggccgccaagaagcgtggtcttgaattccaggaggagcagcaaatcggccgctccggtgccaaccctggctttggcccccttggcatctacaagaagctcctcggcctcatcaagggcaagctgggcctcaccaagtgcaagtttgcctttgctggtgccgcgcccatgacccgtgagacccttcagtactttggcgcgctgaacatcaacattaacgaggtctacggcatgtccgagtgctccggtgccgccacctggtccacggacaaggcccacgagtggggcactgttggctacgagatgcccagttgcgaggtccgcgtcttcaagattgccgaggacggtaccaagaccgagtgcccgcgcgccgccgacattatgcatgctaccgaggaggagcagggcgaagtttgcttccgcggccgtaacatcatgatgggctaccttgccaaccccaagcttggcgacgaccacgttgccgagatcgaggagaagaacgctgccgctatcgactccgagggctggctccacagtggtgataagggcgccatttctacccgcggcatgctcaagatcacgggccgctacaaggagctcatcatcggcgccggtggcgagaacgtggcgcccgtccctattgaggacgccatcaaggcgcgcatgccttttgtttccaacgccatgatggtcggagataagcgcaagttcatggctgtcctccttaccctcaagacggttggcgccacgggcgagcttcccggtacgaacaagctcatgggcgctgccgccgactatggtgagaccatcgaggacgcctgcgacaacgaggcgctcattgaggagatcacgcagcagctcaaggagatcggtgatgatggcgatgtcacgccctcgaacgcggctcgcatccaaaagttcaccattctcccgctcgacttttccgtctccacggacgagctcacggccacgctcaagctcaagcgctccgtggtcgcagacaagtacgaagacatcatcgaggccttttacgagtccaagagcgtttttgtgccgtactcgaccgttggcgcctacgccacgggcggcccggtcgacgactccgttgtcgatggctccttcaagggcgactttagcatgattggcgacgatgatccggatcttcaaaacgtcgatgtcctcgaggcgattgacgaggacaattaaatttgagtagttagcttaatcacttaggtcaccggcctagtaggccggtcaccagtatgaactaaaatgcatgtaggtgtaagagctcatggagagcatggaatattgtatccgaccatgtaacagtataataactgagctccatctcacttcttctatgaataaacaaaggatgttatgatatattaacactctatctatgcaccttattgttctatgataaatttcctcttattattataaatcatctgaatcgtgacggcttatggaatgcttcaaatagtacaaaaacaaatgtgtactataagactttctaaacaattctaactttagcattgtgaacgagacataagtgttaagaagacataacaattataatggaagaagtttgtctccatttatatattatatattacccacttatgtattatattaggatgttaaggagacataacaattataaagagagaagtttgtatccatttatatattatatactacccatttatatattatacttatccacttatttaatgtctttataaggtttgatccatgatatttctaatattttagttgatatgtatatgaaaaggtactatttgaactctcttactctgtataaaggttggatcatccttaaagtgggtctatttaattttattgcttcttacagataaaaaaaaaattatgagttggtttgataaaatattgaaggatttaaaataataataaataataaataacatataatatatgtatataaatttattataatataacatttatctataaaaaagtaaatattgtcataaatctatacaatcgtttagccttgctggaacgaatctcaattatttaaacgagagtaaacatatttgactttttggttatttaacaaattattatttaacactatatgaaattttttttttttatcagcaaagaataaaattaaattaagaaggacaatggtgtcccaatccttatacaaccaacttccacaagaaagtcaagtcagagacaacaaaaaaacaagcaaaggaaattttttaatttgagttgtcttgtttgctgcataatttatgcagtaaaacactacacataacccttttagcagtagagcaatggttgaccgtgtgcttagcttcttttattttatttttttatcagcaaagaataaataaaataaaatgagacacttcagggatgtttcaacccttatacaaaaccccaaaaacaagtttcctagcaccctaccaacgaattcgcggccgcttaattaatctgatcatggatgctacgtcacggcagtacaggactatcactagacctaggagctgtgctgggtaactcacatgagtcactggtcacatcagcggccgcctcccagtatcattatagtgaaagttttggctctctcgccggtggttttttacctctatttaaaggggttttccacctaaaaattctggtatcattctcactttacttgttactttaatttctcataatctttggttgaaattatcacgcttccgcacacgatatccctacaaatttattatttgttaaacattttcaaaccgcataaaattttatgaagtcccgtctatctttaatgtagtctaacattttcatattgaaatatataatttacttaattttagcgttggtagaaagcataatgatttattcttattcttcttcatataaatgtttaatatacaatataaacaaattctttaccttaagaaggatttcccattttatattttaaaaatatatttatcaaatatttttcaaccacgtaaatctcataataataagttgtttcaaaagtaataaaatttaactccataatttttttattcgactgatcttaaagcaacacccagtgacacaactagccatttttttctttgaataaaaaaatccaattatcattgtattttttttatacaatgaaaatttcaccaaacaatgatttgtggtatttctgaagcaagtcatgttatgcaaaattctataattcccatttgacactacggaagtaactgaagatctgcttttacatgcgagacacatcttctaaagtaattttaataatagttactatattcaagatttcatatatcaaatactcaatattacttctaaaaaattaattagatataattaaaatattacttttttaattttaagtttaattgttgaatttgtgactattgatttattattctactatgtttaaattgttttatagatagtttaaagtaaatataagtaatgtagtagagtgttagagtgttaccctaaaccataaactataagatttatggtggactaattttcatatatttcttattgcttttaccttttcttggtatgtaagtccgtaactggaattactgtgggttgccatgacactctgtggtcttttggttcatgcatggatcttgcgcaagaaaaagacaaagaacaaagaaaaaagacaaaacagagagacaaaacgcaatcacacaaccaactcaaattagtcactggctgatcaagatcgccgcgtccatgtatgtctaaatgccatgcaaagcaacacgtgcttaacatgcactttaaatggctcacccatctcaacccacacacaaacacattgcctttttcttcatcatcaccacaaccacctgtatatattcattctcttccgccacctcaatttcttcacttcaacacacgtcaacctgcatatgcgtgtcatcccatgcccaaatctccatgcatgttccaaccaccttctctcttatataatacctataaatacctctaatatcactcacttctttcatcatccatccatccagagtactactactctactactataataccccaacccaactcatattcaatactactctaggatccacaaccaaaaatgttgcagcatacttggctaccaaaacccccaaatttaaccttattgtcagatgaagttcatctctggcgcattccccttgaccaaccagaatcacagctacaggatttagccgctaccttatctagtgacgaattagcccgtgcaaacagattttattttcccgaacatcgccggcgttttactgctggtcgtggtattctccgcagtatcttggggggctatttgggtgtggaaccagggcaagttaaatttgattatgaatcccgtggtaaaccaatattaggcgatcgctttgccgagagtggtttattatttaacttgtcacactcccagaacttggccttgtgtgcagtcaattacacgcgccaaatcggcatcgatttagaatatctccgccccacatctgatttagaatcccttgccaaaaggttctttttaccgcgagaatatgaattattgcgatcgctacccgatgagcaaaaacaaaaaattttctttcgttactggacttgtaaagaggcttatcttaaagcaacgggtgacggcatcgctaaattagaggaaattgaaatagcactaactcccacagaaccagctaagttacagacagctccagcgtggagtctcctagagctagtgccagatgataattgtgttgctgctgttgccgtggcgggttttggctggcagccaaaattctggcattattgagtagttagcttaatcacttaggtcaccagtatgaactaaaatgcatgtaggtgtaagagctcatggagagcatggaatattgtatccgaccatgtaacagtataataactgagctccatctcacttcttctatgaataaacaaaggatgttatgatatattaacactctatctatgcaccttattgttctatgataaatttcctcttattattataaatcatctgaatcgtgacggcttatggaatgcttcaaatagtacaaaaacaaatgtgtactataagactttctaaacaattctaactttagcattgtgaacgagacataagtgttaagaagacataacaattataatggaagaagtttgtctccatttatatattatatattacccacttatgtattatattaggatgttaaggagacataacaattataaagagagaagtttgtatccatttatatattatatactacccatttatatattatacttatccacttatttaatgtctttataaggtttgatccatgatatttctaatattttagttgatatgtatatgaaaaggtactatttgaactctcttactctgtataaaggttggatcatccttaaagtgggtctatttaattttattgcttcttacagataaaaaaaaaattatgagttggtttgataaaatattgaaggatttaaaataataataaataataaataacatataatatatgtatataaatttattataatataacatttatctataaaaaagtaaatattgtcataaatctatacaatcgtttagccttgctggaacgaatctcaattatttaaacgagagtaaacatatttgactttttggttatttaacaaattattatttaacactatatgaaattttttttttttatcagcaaagaataaaattaaattaagaaggacaatggtgtcccaatccttatacaaccaacttccacaagaaagtcaagtcagagacaacaaaaaaacaagcaaaggaaattttttaatttgagttgtcttgtttgctgcataatttatgcagtaaaacactacacataacccttttagcagtagagcaatggttgaccgtgtgcttagcttcttttattttatttttttatcagcaaagaataaataaaataaaatgagacacttcagggatgtttcaacccttatacaaaaccccaaaaacaagtttcctagcaccctaccaacgaattcgcggccgcttaattaactactgtcactgaggccgtagacgagtacggactgatctaactagtgctagcctcgaggtcgacacccagctttcttgtacaaagtggttgcggccgcttaattaaatttaaattcaattaatgcaatcttgattttcaacaacgaaggtaatggcgtaaaagaaaaaatgtatgttattgtattgatctttcatgatgttgaagcgtgccataatatgatgatgtataattaaaatattaactgtcgcattttattgaaatggcactgttatttcaaccatatctttgattctgttacatgacacgactgcaagaagtaaataatagacgccgttgttaaagaattgctatcatatgtgcctaactagagggaatttgagcgtcagacctaatcaaatattacaaaatatctcactctgtcgccagcaatggtgtaatcagcgcagacaaatggcgtaaagatcgcggaaaaacctccccgagtggcatgatagctgcctctgtattgctgatttagtcagccttatttgacttaagggtgccctcgttagtgacaaattgctttcaaggagacagccatgccccacactttgttgaaaaacaaattgcctttggggagacggtaaagccagttgctcttcaataaggaatgtcgaggaggcaatgtaaccgcctctggtagtacacttctctaatccaaaaatcaatttgtattcaagataccgcaaaaaacttatggtttaaaccctgcaggactagtccagaaggtaattatccaagatgtagcatcaagaatccaatgtttacgggaaaaactatggaagtattatgtaagctcagcaagaagcagatcaatatgcggcacatatgcaacctatgttcaaaaatgaagaatgtacagatacaagatcctatactgccagaatacgaagaagaatacgtagaaattgaaaaagaagaaccaggcgaagaaaagaatcttgaagacgtaagcactgacgacaacaatgaaaagaagaagataaggtcggtgattgtgaaagagacatagaggacacatgtaaggtggaaaatgtaagggcggaaagtaaccttatcacaaaggaatcttatcccccactacttatccttttatatttttccgtgtcatttttgcccttgagttttcctatataaggaaccaagttcggcatttgtgaaaacaagaaaaaatttggtgtaagctattttctttgaagtactgaggatacaacttcagagaaatttgtaagtttgtaggtaccagatctggatcccaaaccatgtctccggagaggagaccagttgagattaggccagctacagcagctgatatggccgcggtttgtgatatcgttaaccattacattgagacgtctacagtgaactttaggacagagccacaaacaccacaagagtggattgatgatctagagaggttgcaagatagatacccttggttggttgctgaggttgagggtgttgtggctggtattgcttacgctgggccctggaaggctaggaacgcttacgattggacagttgagagtactgtttacgtgtcacataggcatcaaaggttgggcctaggatctacattgtacacacatttgcttaagtctatggaggcgcaaggttttaagtctgtggttgctgttataggccttccaaacgatccatctgttaggttgcatgaggctttgggatacacagcccggggtacattgcgcgcagctggatacaagcatggtggatggcatgatgttggtttttggcaaagggattttgagttgccagctcctccaaggccagttaggccagttacccaaatctgagtagttagcttaatcacctagagctcgatcggcggcaatagcttcttagcgccatcccgggttgatcctatctgtgttgaaatagttgcggtgggcaaggctctctttcagaaagacaggcggccaaaggaacccaaggtgaggtgggctatggctctcagttccttgtggaagcgcttggtctaaggtgcagaggtgttagcgggatgaagcaaaagtgtccgattgtaacaagatatgttgatcctacgtaaggatattaaagtatgtattcatcactaatataatcagtgtattccaatatgtactacgatttccaatgtctttattgtcgccgtatgtaatcggcgtcacaaaataatccccggtgactttcttttaatccaggatgaaataatatgttattataatttttgcgatttggtccgttataggaattgaagtgtgcttgaggtcggtcgccaccactcccatttcataattttacatgtatttgaaaaataaaaatttatggtattcaatttaaacacgtatacttgtaaagaatgatatcttgaaagaaatatagtttaaatatttattgataaaataacaagtcaggtattatagtccaagcaaaaacataaatttattgatgcaagtttaaattcagaaatatttcaataactgattatatcagctggtacattgccgtagatgaaagactgagtgcgatattatggtgtaatacataggaattcgtttaaacgatctgcgtctaattttcggtccaacttgcacaggaaagacgtcgaccgcggtagctcttgcccagcagactgggcttccagtcctttcgctcgatcgggtccaatgttgtcctcagctgtgaaccggaagcggacgaccaacagtggaagaactgaaaggaacgagccgtctataccttgatgatcggcctctggtgaagggtatcatcgcagccaagcaagctcatgaaaggctgatgggggaggtgtataattatgaggcccacggcgggcttattctttagggaggatctatctcgttgctcaagtgcatggcgcaaagcagttattggagtgcggattttcgttggcatattattcgccacgagttagcagacgaagagaccttcatgaacgtggccaaggccagagttaagcagatgttacgccctgctgcaggcctttctattatccaatagttggttgatctttggaaagagcctcggctgaggcccatactgaaagagatcgatggatatcgatatgccatgttgtttgctagccagaaccagatcacatccgatatgctattgcagcttgacgcagatatggaggataagttgattcatgggatcgctcaggagtagctcatccatgcacgccgacaagaacagaaattccgtcgagttaacgcagccgcttacgacggattcgaaggtcatccattcggaatgtattagtttgcaccagctccgcgtcacacctgtcttcatttgaataagatgttagcaattgtttttagctttgtcttgttgtggcagggcggcaagtgcttcagacatcattctgttttcaaattttatgctggagaacagcttcttaattcctttggaaataatagactgcgtcttaaaattcagatgtctggatatagatatgattgtaaaataacctatttaagtgtcatttagaacataagttttatgaatgttcttccattttcgtcatcgaacgaataagagtaaatacaccttttttaacattacaaataagttcttatacgttgtttatacaccgggaatcatttccattattttcgcgcaaaagtcacggatattcgtgaaagcgacataaactgcgaaatttgcggggagtgtcttgagtttgcctcgaggctagcgcatgcacatagacacacacatcatctcattgatgcttggtaataattgtcattagattgtttttatgcatagatgcactcgaaatcagccaattttagacaagtatcaaacggatgtgacttcagtacattaaaaacgtccgcaatgtgttattaagttgtctaagcgtcaatttgatttacaattgaatatatcctgccccagccagccaacagctcgatttacaattgaatatatcctgccggccggcccacgcgtgtcgaggaattctgatctggcccccatttggacgtgaatgtagacacgtcgaaataaagatttccgaattagaataatttgtttattgctttcgcctataaatacgacggatcgtaatttgtcgttttatcaaaatgtactttcattttataataacgctgcggacatctacatttttgaattgaaaaaaaattggtaattactctttctttttctccatattgaccatcatactcattgctgatccatgtagatttcccggacatgaagccatttacaattgaatatatcctgccgccgctgccgctttgcacccggtggagcttgcatgttggtttctacgcagaactgagccggttaggcagataatttccattgagaactgagccatgtgcaccttccccccaacacggtgagcgacggggcaacggagtgatccacatgggacttttaaacatcatccgtcggatggcgttgcgagagaagcagtcgatccgtgagatcagccgacgcaccgggcaggcgcgcaacacgatcgcaaagtatttgaacgcaggtacaatcgagccgacgttcacgcggaacgaccaagcaagcttggctgccatttttggggtgaggccgttcgcggccgaggggcgcagcccctggggggatgggaggcccgcgttagcgggccgggagggttcgagaagggggggcaccccccttcggcgtgcgcggtcacgcgcacagggcgcagccctggttaaaaacaaggtttataaatattggtttaaaagcaggttaaaagacaggttagcggtggccgaaaaacgggcggaaacccttgcaaatgctggattttctgcctgtggacagcccctcaaatgtcaataggtgcgcccctcatctgtcagcactctgcccctcaagtgtcaaggatcgcgcccctcatctgtcagtagtcgcgcccctcaagtgtcaataccgcagggcacttatccccaggcttgtccacatcatctgtgggaaactcgcgtaaaatcaggcgttttcgccgatttgcgaggctggccagctccacgtcgccggccgaaatcgagcctgcccctcatctgtcaacgccgcgccgggtgagtcggcccctcaagtgtcaacgtccgcccctcatctgtcagtgagggccaagttttccgcgaggtatccacaacgccggcggccgcggtgtctcgcacacggcttcgacggcgtttctggcgcgtttgcagggccatagacggccgccagcccagcggcgagggcaaccagcccggtgagcgtcggaaagggtcgacggatcttttccgctgcataaccctgcttcggggtcattatagcgattttttcggtatatccatcctttttcgcacgatatacaggattttgccaaagggttcgtgtagactttccttggtgtatccaacggcgtcagccgggcaggataggtgaagtaggcccacccgcgagcgggtgttccttcttcactgtcccttattcgcacctggcggtgctcaacgggaatcctgctctgcgaggctggccggctaccgccggcgtaacagatgagggcaagcggatggctgatgaaaccaagccaaccaggaagggcagcccacctatcaaggtgtactgccttccagacgaacgaagagcgattgaggaaaaggcggcggcggccggcatgagcctgtcggcctacctgctggccgtcggccagggctacaaaatcacgggcgtcgtggactatgagcacgtccgcgagctggcccgcatcaatggcgacctgggccgcctgggcggcctgctgaaactctggctcaccgacgacccgcgcacggcgcggttcggtgatgccacgatcctcgccctgctggcgaagatcgaagagaagcaggacgagcttggcaaggtcatgatgggcgtggtccgcccgagggcagagccatgacttttttagccgctaaaacggccggggggtgcgcgtgattgccaagcacgtccccatgcgctccatcaagaagagcgacttcgcggagctggtattcgtgcagggcaagattcggaataccaagtacgagaaggacggccagacggtctacgggaccgacttcattgccgataaggtggattatctggacaccaaggcaccaggcgggtcaaatcaggaataagggcacattgccccggcgtgagtcggggcaatcccgcaaggagggtgaatgaatcggacgtttgaccggaaggcatacaggcaagaactgatcgacgcggggttttccgccgaggatgccgaaaccatcgcaagccgcaccgtcatgcgtgcgccccgcgaaaccttccagtccgtcggctcgatggtccagcaagctacggccaagatcgagcgcgacagcgtgcaactggctccccctgccctgcccgcgccatcggccgccgtggagcgttcgcgtcgtctcgaacaggaggcggcaggtttggcgaagtcgatgaccatcgacacgcgaggaactatgacgaccaagaagcgaaaaaccgccggcgaggacctggcaaaacaggtcagcgaggccaagcaggccgcgttgctgaaacacacgaagcagcagatcaaggaaatgcagctttccttgttcgatattgcgccgtggccggacacgatgcgagcgatgccaaacgacacggcccgctctgccctgttcaccacgcgcaacaagaaaatcccgcgcgaggcgctgcaaaacaaggtcattttccacgtcaacaaggacgtgaagatcacctacaccggcgtcgagctgcgggccgacgatgacgaactggtgtggcagcaggtgttggagtacgcgaagcgcacccctatcggcgagccgatcaccttcacgttctacgagctttgccaggacctgggctggtcgatcaatggccggtattacacgaaggccgaggaatgcctgtcgcgcctacaggcgacggcgatgggcttcacgtccgaccgcgttgggcacctggaatcggtgtcgctgctgcaccgcttccgcgtcctggaccgtggcaagaaaacgtcccgttgccaggtcctgatcgacgaggaaatcgtcgtgctgtttgctggcgaccactacacgaaattcatatgggagaagtaccgcaagctgtcgccgacggcccgacggatgttcgactatttcagctcgcaccgggagccgtacccgctcaagctggaaaccttccgcctcatgtgcggatcggattccacccgcgtgaagaagtggcgcgagcaggtcggcgaagcctgcgaagagttgcgaggcagcggcctggtggaacacgcctgggtcaatgatgacctggtgcattgcaaacgctagggccttgtggggtcagttccggctgggggttcagcagccagcgctttactggcatttcaggaacaagcgggcactgctcgacgcacttgcttcgctcagtatcgctcgggacgcacggcgcgctctacgaactgccgataaacagaggattaaaattgacaattgtgattaaggctcagattcgacggcttggagcggccgacgtgcaggatttccgcgagatccgattgtcggccctgaagaaagctccagagatgttcgggtccgtttacgagcacgaggagaaaaagcccatggaggcgttcgctgaacggttgcgagatgccgtggcattcggcgcctacatcgacggcgagatcattgggctgtcggtcttcaaacaggaggacggccccaaggacgctcacaaggcgcatctgtccggcgttttcgtggagcccgaacagcgaggccgaggggtcgccggtatgctgctgcgggcgttgccggcgggtttattgctcgtgatgatcgtccgacagattccaacgggaatctggtggatgcgcatcttcatcctcggcgcacttaatatttcgctattctggagcttgttgtttatttcggtctaccgcctgccgggcggggtcgcggcgacggtaggcgctgtgcagccgctgatggtcgtgttcatctctgccgctctgctaggtagcccgatacgattgatggcggtcctgggggctatttgcggaactgcgggcgtggcgctgttggtgttgacaccaaacgcagcgctagatcctgtcggcgtcgcagcgggcctggcgggggcggtttccatggcgttcggaaccgtgctgacccgcaagtggcaacctcccgtgcctctgctcacctttaccgcctggcaactggcggccggaggacttctgctcgttccagtagctttagtgtttgatccgccaatcccgatgcctacaggaaccaatgttctcggcctggcgtggctcggcctgatcggagcgggtttaacctacttcctttggttccgggggatctcgcgactcgaacctacagttgtttccttactgggctttctcagcccccgagcgcttagtgggaatttgtaccccttatcgaaccgggagcacaggatgacgcctaacaattcattcaagccgacaccgcttcgcggcgcggcttaattcaggagttaaacatcatgagggaagcggtgatcgccgaagtatcgactcaactatcagaggtagttggcgtcatcgagcgccatctcgaaccgacgttgctggccgtacatttgtacggctccgcagtggatggcggcctgaagccacacagtgatattgatttgctggttacggtgaccgtaaggcttgatgaaacaacgcggcgagctttgatcaacgaccttttggaaacttcggcttcccctggagagagcgagattctccgcgctgtagaagtcaccattgttgtgcacgacgacatcattccgtggcgttatccagctaagcgcgaactgcaatttggagaatggcagcgcaatgacattcttgcaggtatcttcgagccagccacgatcgacattgatctggctatcttgctgacaaaagcaagagaacatagcgttgccttggtaggtccagcggcggaggaactctttgatccggttcctgaacaggatctatttgaggcgctaaatgaaaccttaacgctatggaactcgccgcccgactgggctggcgatgagcgaaatgtagtgcttacgttgtcccgcatttggtacagcgcagtaaccggcaaaatcgcgccgaaggatgtcgctgccgactgggcaatggagcgcctgccggcccagtatcagcccgtcatacttgaagctaggcaggcttatcttggacaagaagatcgcttggcctcgcgcgcagatcagttggaagaatttgttcactacgtgaaaggcgagatcaccaaggtagtcggcaaataatgtctaacaattcgttcaagccgacgccgcttcgcggcgcggcttaactcaagcgttagagagctggggaagactatgcgcgatctgttgaaggtggttctaagcctcgtcttgcgatggcatttcgatccattcccattccgcgctcaagatggcttcccctcggcagttcatcagggctaaatcaatctagccgacttgtccggtgaaatgggctgcactccaacagaaacaatcaaacaaacatacacagcgacttattcacacgagctcaaattacaacggtatatatcctgccagtcagcatcatcacaccaaaagttaggcccgaatagtttgaaattagaaagctcgcaattgaggtctacaggccaaattcgctcttagccgtacaatattactcaccggatcctaaccggtttaattaaggcgcgccatgcccgggcaagcggccgcacaagttt

SEQ ID NO: 51 - DNA, 46978 bp, Artificial sequence
  plasmid pDAB9330
gtacaaaaaagcaggcttctagacctaggtggagtcatcacgcagactatctcagcatgtgcgtagcacgcggccgcctcccagtatcattatagtgaaagttttggctctctcgccggtggttttttacctctatttaaaggggttttccacctaaaaattctggtatcattctcactttacttgttactttaatttctcataatctttggttgaaattatcacgcttccgcacacgatatccctacaaatttattatttgttaaacattttcaaaccgcataaaattttatgaagtcccgtctatctttaatgtagtctaacattttcatattgaaatatataatttacttaattttagcgttggtagaaagcataatgatttattcttattcttcttcatataaatgtttaatatacaatataaacaaattctttaccttaagaaggatttcccattttatattttaaaaatatatttatcaaatatttttcaaccacgtaaatctcataataataagttgtttcaaaagtaataaaatttaactccataatttttttattcgactgatcttaaagcaacacccagtgacacaactagccatttttttctttgaataaaaaaatccaattatcattgtattttttttatacaatgaaaatttcaccaaacaatgatttgtggtatttctgaagcaagtcatgttatgcaaaattctataattcccatttgacactacggaagtaactgaagatctgcttttacatgcgagacacatcttctaaagtaattttaataatagttactatattcaagatttcatatatcaaatactcaatattacttctaaaaaattaattagatataattaaaatattacttttttaattttaagtttaattgttgaatttgtgactattgatttattattctactatgtttaaattgttttatagatagtttaaagtaaatataagtaatgtagtagagtgttagagtgttaccctaaaccataaactataagatttatggtggactaattttcatatatttcttattgcttttaccttttcttggtatgtaagtccgtaactggaattactgtgggttgccatgacactctgtggtcttttggttcatgcatggatcttgcgcaagaaaaagacaaagaacaaagaaaaaagacaaaacagagagacaaaacgcaatcacacaaccaactcaaattagtcactggctgatcaagatcgccgcgtccatgtatgtctaaatgccatgcaaagcaacacgtgcttaacatgcactttaaatggctcacccatctcaacccacacacaaacacattgcctttttcttcatcatcaccacaaccacctgtatatattcattctcttccgccacctcaatttcttcacttcaacacacgtcaacctgcatatgcgtgtcatcccatgcccaaatctccatgcatgttccaaccaccttctctcttatataatacctataaatacctctaatatcactcacttctttcatcatccatccatccagagtactactactctactactataataccccaacccaactcatattcaatactactctaggatccacaaccaaaaatggcagcgaggctgcaagagcagaaaggaggtgagatggacacgaggattgcgatcataggcatgagcgccatacttccttgtggaaccacggtgagagagtcatgggagaccataagggctggcattgattgcctgtctgatcttcctgaggatcgtgttgatgtgactgcgtactttgacccagtcaagaccacaaaggacaaaatctactgcaagagaggaggtttcattcctgagtatgactttgatgcgcgtgagtttggtctcaacatgttccagatggaagattctgatgcgaatcagaccatctcacttctcaaggtcaaagaagcacttcaagatgctgggattgatgcacttggaaaggagaagaaaaacataggatgcgtgcttggcattggaggtggacagaagagttcacatgagttctacagcagactcaactatgtggttgtggagaaagtcttgagaaagatggggatgccagaggaagatgtcaaagtggctgtggagaagtacaaagcgaacttcccagaatggagacttgactctttccctggattccttgggaatgtcactgctggcagatgcaccaacacattcaacttggatggcatgaactgcgttgtggatgctgcatgtgcaagctccttgatagcagtcaaggttgcgattgatgaactgctctatggtgactgcgacatgatggtcactggtgcaacctgcacagacaactccattgggatgtacatggctttctcaaagacacctgtgttcagcacggacccaagtgtgagagcgtatgatgagaaaacgaaagggatgctcattggtgagggatcagccatgttggtgctcaaacgttatgcagatgcagtgagggatggtgatgagattcatgctgtgattcgtggttgtgcaagctcaagtgatggcaaagcagctggcatctacactcccacaatcagtggtcaagaggaagccttgagacgtgcatacaatcgtgcctgcgttgaccctgccactgtcactttggttgagggtcatgggactggcactccagttggagataggattgagttgactgcgttgaggaacttgtttgacaaagcgtatggtgaagggaacacagagaaagttgcagttggaagtatcaagtccagtattggtcatttgaaggctgttgctggtcttgctggaatgatcaaggtcatcatggctctcaaacacaagactttgcctggaacgatcaatgtggacaatccacccaatctctatgacaacactcccatcaatgagtcatccctctacatcaacacgatgaacagaccctggttccctccacctggtgttccgagacgtgctggaatatccagctttggctttggaggtgccaactaccatgcagtgttggaagaggctgaaccagagcacacgacagcgtacagactcaacaaacgtccacaaccggtgttgatgatggctgcaactcctgctgcgttgcagagcctttgtgaagctcagctgaaagagtttgaagctgcgatcaaggagaatgagacagtcaagaatactgcctacatcaagtgtgtcaagtttggagaacagttcaagttccctgggagcatacctgcgaccaatgcgagactgggattcttggtcaaagatgcggaggatgcgtgctccacgcttcgtgctatatgtgctcagtttgccaaagatgtgaccaaagaagcgtggaggcttccgagagaaggagtttctttccgtgccaaaggcattgccaccaatggtgctgttgctgcactcttctctggacaaggtgctcagtacacacacatgttcagtgaagttgcgatgaactggcctcagttcagacagtccattgctgcaatggacgctgcacagtccaaggttgctggaagtgacaaagactttgaaagagtctctcaagtcctgtacccaaggaaaccgtacgaacgtgagccagaacaagatcacaagaaaatctcactcacagcatacagccagccgtcaaccctggcatgtgctcttggtgcctttgagattttcaaggaagctggattcactccagactttgcagctggacacagcttgggtgagtttgctgcgctctatgcagctggttgtgttgacagagatgagttgtttgaacttgtttgcagaagggcaaggatcatgggaggcaaagatgcacctgccacacccaaaggttgcatggcagctgtcataggacccaacgcagagaacatcaaggttcaagctgccaacgtctggcttggaaactcaaactctccgtctcagactgtcattactgggtctgttgaagggattcaagctgaaagtgccagattgcagaaggaagggttcagagttgtgcctcttgcttgtgagtctgccttccattctccacagatggaaaatgccagctcagctttcaaagatgtcatatccaaggtttccttccgtacacccaaagcagaaacaaagctcttcagcaatgtttctggagagacctatccgacggatgccagagagatgctcactcaacacatgacctcatctgtgaagttcctgacccaagtgaggaacatgcaccaagctggtgcgagaatctttgttgagtttggaccgaaacaagttctcagcaaacttgtttctgaaaccctcaaagatgacccgtctgttgtcacagtgtctgtgaacccagcttctggcacggactctgacatacagttgagggatgctgcagttcagctggttgtggctggtgtcaatcttcaagggtttgacaagtgggatgctcctgatgccacgaggatgcaagccatcaagaaaaagagaaccacactcagactttcagctgccacctatgtcagtgacaagaccaagaaagtgagggatgctgccatgaacgacggaagatgtgtcacatacctcaagggtgctgcaccactcatcaaggctcctgaacctgtggttgacgaagctgccaagagggaggctgaaaggcttcagaaggagcttcaagacgctcagaggcagcttgacgacgccaaacgtgcagctgcagaagccaactccaaacttgctgctgccaaggaggaagccaagactgctgcagcttcagccaagcctgcagttgacactgctgttgtggagaaacatcgtgccatcctcaagtccatgctggctgagctggatggttatggaagtgttgatgcttcttcccttcagcaacagcaacagcaacagactgctccggcgcctgttaaagccgctgcccctgccgctcccgttgcaagtgctcctgctcccgccgtgtccaacgagttgcttgagaaagctgagacagttgtgatggaggttctcgctgccaagactggatacgaaacagacatgattgaggcggacatggagcttgagactgagttgggaattgacagcatcaagagggttgaaattctttctgaagtccaagctatgcttaacgttgaggcgaaagatgttgatgctctctctaggacgagaacagtgggtgaagttgtcaacgctatgaaggcagaaatcgctggttcttccgctccggcgccggcagctgccgcacctgcaccggctaaagcggctccagctgcagctgcaccagctgtttctaatgagctgctcgaaaaggcagaaactgttgtgatggaagtccttgctgccaaaactggctacgaaactgacatgatagaatcagacatggagcttgagacggagcttggaattgattccatcaagcgtgtggaaatcctcagtgaagtccaagccatgctcaatgtggaagctaaggatgtggatgctctctcaaggaccagaactgtcggtgaggttgtcaatgccatgaaggctgagatagctggaggctccgctcctgcgccggccgctgccgctcctggtcccgctgccgcggctccagctccagctgcagccgctccggccgtctcaaacgaactccttgaaaaagctgagaccgtcgtgatggaggtcttggcagctaaaaccggctatgagactgacatgattgagtctgacatggaattggagacagaacttgggatagacagcatcaaacgtgttgaaatcctcagtgaggtccaagctatgctgaacgtggaagcgaaggatgttgatgctctgtccagaacgaggaccgttggtgaggttgtggatgccatgaaggctgaaattgctggagggtctgcgcccgcgccagctgcagccgctcctgcacccgcagccgcggcacctgctccagctgcacctgcacctgccgtttcttcagaactcttggagaaggctgagacggttgtgatggaggttttggctgcaaagactggctatgagaccgacatgattgaatctgatatggaattggagacagagcttgggatcgattccatcaaaagagtggagatcctgagtgaagtccaagccatgctcaatgttgaagctaaggatgttgatgcactttcaagaacaaggacagtgggtgaggttgtggatgccatgaaggcggagattgctggagggagcgcgcctgcgccagctgccgcggcacctgcaccggcagccgcagctccagctccagctgcaccagcaccggccgcgcccgcgccagctgtttcatccgaactcctggaaaaggccgagacggttgtgatggaggtgctcgcagctaagactggttacgagaccgacatgattgaaagtgacatggagcttgaaaccgagttgggaatagatagcatcaaacgtgttgaaatcttgtctgaggtccaagctatgttgaacgtggaggcaaaagatgtcgatgcgctttcaagaaccagaacagtcggtgaggtcgtggacgccatgaaggctgaaattgccggaagctctgctagtgcgccagctgcagccgcacctgcacctgctgccgcggcacctgctccagctgcagccgctcctgccgtcagcaatgagttgctggagaaagccgaaacagttgtgatggaagtccttgctgcaaaaactggttacgaaacggacatgattgagtcagacatggaattggagaccgaacttggaatagattccatcaagagagtggagatcctctctgaggtgcaagccatgctcaacgttgaggctaaagatgttgatgcactcagtaggacaagaactgtgggggaagttgtcgatgcgatgaaggctgagattgctggaggctctgctcctgcgccggcagctgccgcacctgcacccgcagccgcggcaccagctgtcagcaacgaattgcttgagaaggctgaaacagttgtcatggaagtgctggctgcaaaaaccggctatgagactgacatgattgagtctgacatggaacttgagacggaattgggcattgacagcatcaagcgtgttgagatcctcagtgaagtccaagcaatgctcaatgtggaggctaaggatgtggatgccctctcaaggaccagaacagttggtgaggtcgttgatgcgatgaaggcggagatcgctggaagttccgcgcctgcgccagctgcagccgctcctgcacccgcagccgcggcaccggctccagctgcagccgcaccggccgtctcctcagaactcctggaaaaggctgagacagttgtgatggaagtccttgctgcgaaaactggctatgagaccgacatgattgaatctgacatggaactggagaccgagcttggaattgactccatcaaacgtgttgaaatcctctctgaggttcaagcgatgttgaatgtggaggccaaagatgttgatgctctttccagaacaaggacggtgggagaggtggttgatgccatgaaggctgagatagctgggggttctgctcctgcgccagctgcagccgctcctgctcccgctgccgcggcaccagctgtcagcaacgaactccttgaaaaagctgaaactgttgtgatggaggttttggctgcaaagactggatacgagactgacatgatagagtcagacatggagttggaaacagagcttgggattgatagcatcaagcgtgtggaaatcctttctgaggttcaagccatgctgaacgttgaggccaaagatgtcgatgctttgtcaaggaccagaacggttggagaagtggtcgatgccatgaaggctgagatagctggtggatcagcccctgctccggctgcagccgctcctgcaagtgccggtgctgcaccagctgtgaagattgattcagttcatggtgctgactgtgacgatttgtcactgatgcacgcaaaggtggttgacatcagaaggccagatgaactgattctggaaagaccggagaaccgtccagttcttgtcgttgacgatggctcagagttgacacttgctcttgtgagggtgttgggagcctgtgcagttgtcttgacctttgagggattgcagttggctcagagagctggtgcagctgccattcgtcatgttctggctaaggacctttcagcagaatcagctgagaaggccatcaaagaggctgagcaaagatttggagcgttgggaggcttcataagccagcaagcagaaaggtttgaaccagctgagatactgggtttcacactcatgtgtgcgaagtttgccaaagcctctctctgcactgctgtggctggaggtcgtcctgccttcatcggtgtggctaggcttgacggcagacttggattcacctctcaaggcacttctgacgcactcaagagagcacagcgtggagcgatctttggactctgcaagacaatagggttggagtggtcagaatctgatgtgttcagccgtggtgtggacattgctcaagggatgcacccagaagatgctgcagttgccatagttagggagatggcgtgtgctgacatcagaatcagagaggttgggattggagcaaaccagcaaagatgcacaatcagagctgccaagttggagactgggaaccctcagagacagatagcgaaagacgatgtgcttctggtttctggaggtgctcgtgggatcacacctctttgcatccgtgagatcacgcgtcagattgctggaggcaagtacattctgttgggtcgtagcaaagtttctgcgtctgaaccagcatggtgtgctggcatcactgatgagaaggctgtgcagaaagctgccacccaagagttgaagagggccttcagtgctggtgaaggacccaaacccactccaagggctgtcacgaaacttgtgggatctgttcttggtgctcgtgaagtgagaagctccattgctgccattgaagctctgggtggcaaagcgatctacagctcttgtgatgtgaactctgctgcagatgttgccaaagcagttagggatgcagagtcccagcttggtgccagagttagtggaatcgttcacgcttctggtgtgctccgtgatcgtctcatagagaagaaactccctgacgagtttgatgctgtctttgggaccaaagtcactgggttggagaatcttctggctgcagttgatcgtgccaacctcaaacacatggttctcttcagctcccttgctggtttccacggcaatgttggtcagtctgactatgcgatggcaaacgaagctctcaacaagatgggtttggaacttgcgaaggatgtcagtgtcaagtccatctgctttggtccctgggatggtgggatggtgacacctcaactcaagaaacagtttcaagaaatgggagttcagatcattcctcgtgaaggaggtgctgatacagttgcgaggattgtgttgggatcaagtcctgctgagatccttgttggaaactggaggacaccatccaagaaagttggaagtgacacgatcaccctgcatagaaagatcagtgccaagtccaatcccttcttggaggatcatgtcatacaaggcagaagggtgttgccaatgacccttgctattgggagccttgctgagacctgccttggactcttccctggctactctctctgggccatagatgacgcacagctcttcaaaggtgtcactgttgatggagacgtcaactgtgaagtgaccctcacaccgtccactgctccgagtgggagggtgaatgtccaagcgacgctcaagacgttctcaagtggaaaacttgttccagcctacagagctgtcatagtgttgtccaaccaaggtgctccacctgccaatgcaaccatgcagcctccgagccttgatgcagatcctgctttgcaagggtcagtctatgatggcaagactctctttcatggtcctgcgttcagaggcattgatgacgttctcagctgcaccaagagccagcttgttgccaagtgttctgctgttcctggatcagatgcagccagaggagagtttgcaactgacactgatgcacatgatccctttgtcaatgatcttgcctttcaagcaatgttggtctgggtgaggagaacgctgggacaagctgcactcccgaactccattcagaggatagtccaacacagaccggtcccacaagacaaacccttctacatcaccctcagatccaatcagagtggtggacatagccagcacaaacatgcacttcagttccacaacgaacaaggtgatctcttcattgatgttcaagcctctgtcattgcgacagactcacttgcgttctgagtagttagcttaatcacttaggtcaccagtatgaactaaaatgcatgtaggtgtaagagctcatggagagcatggaatattgtatccgaccatgtaacagtataataactgagctccatctcacttcttctatgaataaacaaaggatgttatgatatattaacactctatctatgcaccttattgttctatgataaatttcctcttattattataaatcatctgaatcgtgacggcttatggaatgcttcaaatagtacaaaaacaaatgtgtactataagactttctaaacaattctaactttagcattgtgaacgagacataagtgttaagaagacataacaattataatggaagaagtttgtctccatttatatattatatattacccacttatgtattatattaggatgttaaggagacataacaattataaagagagaagtttgtatccatttatatattatatactacccatttatatattatacttatccacttatttaatgtctttataaggtttgatccatgatatttctaatattttagttgatatgtatatgaaaaggtactatttgaactctcttactctgtataaaggttggatcatccttaaagtgggtctatttaattttattgcttcttacagataaaaaaaaaattatgagttggtttgataaaatattgaaggatttaaaataataataaataataaataacatataatatatgtatataaatttattataatataacatttatctataaaaaagtaaatattgtcataaatctatacaatcgtttagccttgctggaacgaatctcaattatttaaacgagagtaaacatatttgactttttggttatttaacaaattattatttaacactatatgaaattttttttttttatcagcaaagaataaaattaaattaagaaggacaatggtgtcccaatccttatacaaccaacttccacaagaaagtcaagtcagagacaacaaaaaaacaagcaaaggaaattttttaatttgagttgtcttgtttgctgcataatttatgcagtaaaacactacacataacccttttagcagtagagcaatggttgaccgtgtgcttagcttcttttattttatttttttatcagcaaagaataaataaaataaaatgagacacttcagggatgtttcaacccttatacaaaaccccaaaaacaagtttcctagcaccctaccaacgaattcgcggccgcttaattaagatgagtgatactcaggactcaggactcactctgctgatcactagtgctagcctcgaggtcgacacaactttgtatacaaaagttgtctagacctaggctcagcaactcatccagtcaagttcgagtcagtgagttgggcggccgcctcccagtatcattatagtgaaagttttggctctctcgccggtggttttttacctctatttaaaggggttttccacctaaaaattctggtatcattctcactttacttgttactttaatttctcataatctttggttgaaattatcacgcttccgcacacgatatccctacaaatttattatttgttaaacattttcaaaccgcataaaattttatgaagtcccgtctatctttaatgtagtctaacattttcatattgaaatatataatttacttaattttagcgttggtagaaagcataatgatttattcttattcttcttcatataaatgtttaatatacaatataaacaaattctttaccttaagaaggatttcccattttatattttaaaaatatatttatcaaatatttttcaaccacgtaaatctcataataataagttgtttcaaaagtaataaaatttaactccataatttttttattcgactgatcttaaagcaacacccagtgacacaactagccatttttttctttgaataaaaaaatccaattatcattgtattttttttatacaatgaaaatttcaccaaacaatgatttgtggtatttctgaagcaagtcatgttatgcaaaattctataattcccatttgacactacggaagtaactgaagatctgcttttacatgcgagacacatcttctaaagtaattttaataatagttactatattcaagatttcatatatcaaatactcaatattacttctaaaaaattaattagatataattaaaatattacttttttaattttaagtttaattgttgaatttgtgactattgatttattattctactatgtttaaattgttttatagatagtttaaagtaaatataagtaatgtagtagagtgttagagtgttaccctaaaccataaactataagatttatggtggactaattttcatatatttcttattgcttttaccttttcttggtatgtaagtccgtaactggaattactgtgggttgccatgacactctgtggtcttttggttcatgcatggatcttgcgcaagaaaaagacaaagaacaaagaaaaaagacaaaacagagagacaaaacgcaatcacacaaccaactcaaattagtcactggctgatcaagatcgccgcgtccatgtatgtctaaatgccatgcaaagcaacacgtgcttaacatgcactttaaatggctcacccatctcaacccacacacaaacacattgcctttttcttcatcatcaccacaaccacctgtatatattcattctcttccgccacctcaatttcttcacttcaacacacgtcaacctgcatatgcgtgtcatcccatgcccaaatctccatgcatgttccaaccaccttctctcttatataatacctataaatacctctaatatcactcacttctttcatcatccatccatccagagtactactactctactactataataccccaacccaactcatattcaatactactctaggatccacaaccaaaaatggctgcaaggaacgtgagtgcggctcatgagatgcatgacgagaagaggatagctgttgtgggcatggctgttcagtatgctggatgcaaaacgaaagacgagttctgggaagttctcatgaatggaaaagttgagagcaaagtgatcagcgacaaacgtcttggttcaaattaccgtgctgaacactacaaagctgaaaggagcaagtatgctgacaccttctgcaatgagacatatggaactcttgatgagaacgaaatagacaatgagcatgaactccttttgaaccttgccaaacaagccttggctgaaacatctgtcaaagattcaacaagatgtggcatagtttctggatgcctcagcttcccgatggacaacctccaaggtgaactcttgaatgtgtaccagaaccatgttgagaagaaacttggtgccagagttttcaaagatgcctctcactggtcagaaagagaacagtccaacaaaccagaggctggtgacagaagaatcttcatggaccctgcttcctttgttgctgaggaactcaatcttggcgctctccactactctgttgatgctgcctgtgccactgcgctctatgtgctcagactggcgcaagatcacttggtctctggtgcagctgatgtgatgctttgtggtgcaacatgcctgccggagccgtttttcatactctctgggttctcaaccttccaagccatgcctgttggaacgggtcagaatgtgtccatgccgctgcacaaagattctcaaggattgacccctggtgaaggaggttccatcatggtcctcaaacgtttggatgacgcaatcagagatggagatcacatctatggaacacttttgggagccaatgtcagcaacagtggcactggtctgccacttaaaccccttttgccgtcagagaaaaagtgcctcatggacacctacacacgtatcaatgtgcatccccacaagattcagtatgttgaatgccatgcaactgggactccacaaggtgatcgtgtggaaattgatgctgtgaaggcttgctttgaaggcaaagtcccacgttttggaaccacaaaagggaactttggacacacattggtggcagctgggtttgctggcatgtgcaaagtgcttctctccatgaagcacgggatcattccacccactccgggaatagatgacgaaacgaagatggaccctctggttgtctctggtgaggccattccctggccagaaacgaatggagaaccgaagcgtgctggtctctcagcgtttggatttggtgggaccaatgctcatgctgtctttgaggaacatgacccaagcaatgctgcatgcactggccatgactccatttctgctctctctgcacgttgtggtggtgagtcaaacatgagaatagcaatcactgggatggatgccacttttggtgctttgaaaggattggatgcttttgaaagggccatctacactggtgctcatggtgctataccactcccagaaaagagatggagattcctggggaaagacaaggacttccttgatctttgtggagtcaaagcaacaccgcatggctgttacattgaagatgttgaagttgatttccagaggctgaggactccaatgactcctgaagatatgctcttgcctcaacagcttctggctgtcaccacaattgatagggccatattggactctggcatgaagaaaggtggaaatgtggctgtctttgtggggttggggaccgatcttgaactctaccgtcaccgtgcaagggttgctctcaaggagagagtgaggcctgaagccagcaagaaactcaatgacatgatgcagtacatcaatgattgtgggacaagcacttcttacaccagctacataggcaacttggttgcaacaagggtcagttcacaatggggcttcacgggaccttccttcacaatcacagaaggcaacaattctgtgtacagatgtgctgaacttggcaaatacctcttggaaacgggagaggttgatggggttgtggttgcgggtgttgatctctgtgggagtgctgagaacctttacgtcaagtcaaggcgtttcaaggtgtctacatctgacaccccgagagccagctttgatgcagctgctgatggttactttgttggagagggctgtggtgcatttgtgctcaagcgtgagacaagctgcaccaaggatgacagaatctatgcttgcatggatgccatagttcctggaaatgttccatctgcatgtttgagagaggcattggatcaagccagagtcaagcctggagacatcgagatgttggagctttctgctgattcagcgaggcatttgaaggacccgtctgttctcccaaaggaactcactgctgaggaagagattggcggacttcagacgattcttcgtgacgatgacaagctcccaaggaatgttgcaactggaagtgtcaaggccactgttggtgacactggttatgcttctggtgctgccagtttgattaaggctgcgctttgcatctacaaccgttacctgcccagcaatggagatgactgggatgaacctgcacctgaagcaccctgggacagcacactctttgcgtgccagacctcaagagcttggttgaagaaccctggtgagagacgttatgcggctgtttccggagtcagtgaaaccagaagttgctacagtgtgctgctttctgaagcagagggacactacgagagagagaacagaatcagtttggatgaggaagcacccaagctcattgtgttgagagcagactcccatgaagagattcttggaagattggacaagataagggaaaggttcttgcagcccacgggtgctgcacccagagagtctgaattgaaggcgcaagcccgtaggatctttcttgaactccttggtgagacccttgcccaagatgcagcttcatctggaagtcagaagccccttgctctcagcttggtctccactccatccaagctccagagagaggtggaacttgcggcaaaaggcattccgagatgtctcaagatgagacgtgattggagttcccctgctggaagcagatatgcgcctgagcctttggccagtgacagagttgccttcatgtatggagaaggaaggagcccttactatggcatcacacaagacattcataggatttggcctgaacttcatgaggtcatcaatgagaaaacaaaccgtctctgggctgaaggtgacagatgggtcatgccaagggccagcttcaagagtgagcttgagtcacaacagcaagagtttgacagaaacatgattgaaatgttccgtcttggaatcctcacctcaattgccttcacaaacctggcgagagatgttctcaacatcacgcccaaagcagcctttggactcagtttgggagagatttccatgatctttgctttctccaagaaaaacggtttgataagcgatcagttgacaaaggatttgagagagtcagatgtctggaacaaagctctggctgttgagttcaatgcgctcagagaagcctggggcattccacagtctgtcccaaaagatgagttctggcaaggttacatagtgaggggaacgaaacaagacatagaagcagccatagcaccagactcaaagtatgtgaggttgaccatcatcaatgatgccaacactgctctcatcagtggaaagcctgatgcatgcaaagctgcgattgctcgtcttggtggcaacatccctgcgcttccagtcactcaaggcatgtgtgggcattgcccagaggtgggaccttacaccaaggacatcgcaaagatccacgccaaccttgagttccctgtggttgatggtcttgatctctggactaccataaaccagaagaggcttgtgccaagagccacgggtgccaaagatgaatgggctccttcatcctttggggagtatgctggacagctctatgagaaacaagccaacttccctcagatagttgaaaccatctacaagcagaactatgatgtgtttgttgaagttgggccaaacaatcacagaagcacagcagtgagaaccacgcttggaccacagagaaaccaccttgctggtgccatagacaagcagaacgaggatgcttggacgacaatagtcaagctcgtggcttcattgaaggctcaccttgttcctggagtgaccatcagtccgctctaccactccaagctcgttgcagaggctgaggcttgttatgctgcgctctgtaaaggtgagaaacccaagaaaaacaagtttgtgagaaagattcagttgaatggcagattcaacagcaaggcagaccccatctcctcagcagaccttgcatccttcccacctgcggaccctgcgattgaagctgccatctcttcaaggatcatgaagcctgtggctccgaaattctatgcgcgtctcaacattgatgagcaagatgagaccagagatccgatcttgaacaaggacaatgcgccttccagctccagctcttccagcagttcctcttccagcagttcatctccgtctcctgctccttcagctccagttcagaagaaagctgccccagctgcggagacaaaagctgttgccagtgctgatgcacttcgtagtgccctgcttgatcttgactccatgcttgcgctcagctctgcaagtgcttctggcaaccttgttgagactgcgccatctgatgccagtgtcattgtccctccgtgcaacattgctgatcttggcagcagagctttcatgaaaacttatggtgtttctgcgcctctgtacaccggtgcaatggccaagggaattgcctctgcggacttggtgatcgcagctggaaggcaaggaatccttgcgtcatttggtgctggaggccttccaatgcaagttgtgcgtgagtccattgaaaagattcaagctgccctgcccaatggaccatatgctgtcaacctcatccattctccttttgacagcaaccttgagaagggaaatgttgatctcttcttggaaaagggtgtcacttttgttgaggcttcagccttcatgacgttgacaccgcaagttgtcagatacagagcggctgggttgacgaggaatgcagatgggtcagtcaacataaggaacagaatcattgggaaagtctccagaactgagctggctgaaatgttcatgcgtcctgcacctgagcatcttttgcagaagctcattgcttctggggagatcaatcaagaacaagctgagttggccagacgtgttcctgtggctgatgacattgcggttgaagctgattctggtggacacactgacaaccgtccaatccatgtcattctgcctctgattatcaacctgagggataggcttcacagagagtgtggatacccagcaaacctgagggttcgtgttggtgctgggggtggcattgggtgtccccaagctgcgctggcaactttcaacatgggtgcctctttcattgtcactggaacagtgaaccaagttgccaaacaatctgggacgtgtgacaatgtgaggaaacagcttgcgaaagcaacttactcagatgtttgcatggcaccggcagctgacatgtttgaggaaggtgtgaaacttcaagttttgaagaaaggaacaatgttcccttcaagagccaacaaactctatgagttgttctgcaagtatgattcttttgagtccatgcctccagcagagcttgcgagggttgagaaaagaatcttcagtcgtgcattggaagaggtctgggatgagaccaagaacttctacatcaaccgtctccacaacccagagaagatacagagggctgagagggaccccaaactgaagatgtcactgtgtttcagatggtatctgtccctggcttcaaggtgggccaacactggagcttctgacagagtcatggactaccaagtttggtgtggtcctgccattggttcattcaatgatttcatcaaaggaacttaccttgatccggcagtggcaaatgagtacccgtgtgttgtgcagatcaacaaacagattcttagaggagcgtgcttcttgaggcgtcttgaaatactgagaaatgcaaggctttcagatggtgcagctgcacttgtggcgagcattgatgacacatatgtccctgctgagaagctgtgagtagttagcttaatcacttaggtcaccagtatgaactaaaatgcatgtaggtgtaagagctcatggagagcatggaatattgtatccgaccatgtaacagtataataactgagctccatctcacttcttctatgaataaacaaaggatgttatgatatattaacactctatctatgcaccttattgttctatgataaatttcctcttattattataaatcatctgaatcgtgacggcttatggaatgcttcaaatagtacaaaaacaaatgtgtactataagactttctaaacaattctaactttagcattgtgaacgagacataagtgttaagaagacataacaattataatggaagaagtttgtctccatttatatattatatattacccacttatgtattatattaggatgttaaggagacataacaattataaagagagaagtttgtatccatttatatattatatactacccatttatatattatacttatccacttatttaatgtctttataaggtttgatccatgatatttctaatattttagttgatatgtatatgaaaaggtactatttgaactctcttactctgtataaaggttggatcatccttaaagtgggtctatttaattttattgcttcttacagataaaaaaaaaattatgagttggtttgataaaatattgaaggatttaaaataataataaataataaataacatataatatatgtatataaatttattataatataacatttatctataaaaaagtaaatattgtcataaatctatacaatcgtttagccttgctggaacgaatctcaattatttaaacgagagtaaacatatttgactttttggttatttaacaaattattatttaacactatatgaaattttttttttttatcagcaaagaataaaattaaattaagaaggacaatggtgtcccaatccttatacaaccaacttccacaagaaagtcaagtcagagacaacaaaaaaacaagcaaaggaaattttttaatttgagttgtcttgtttgctgcataatttatgcagtaaaacactacacataacccttttagcagtagagcaatggttgaccgtgtgcttagcttcttttattttatttttttatcagcaaagaataaataaaataaaatgagacacttcagggatgtttcaacccttatacaaaaccccaaaaacaagtttcctagcaccctaccaacgaattcgcggccgcttaattaatctgacctgaccactagacctgagtgagtacagatgtgctactagtgctagcctcgaggtcgaccaacttttctatacaaagttgtctagacctaggactaggcactgagtgactcactgacctgactgagtgactggcggccgcctcccagtatcattatagtgaaagttttggctctctcgccggtggttttttacctctatttaaaggggttttccacctaaaaattctggtatcattctcactttacttgttactttaatttctcataatctttggttgaaattatcacgcttccgcacacgatatccctacaaatttattatttgttaaacattttcaaaccgcataaaattttatgaagtcccgtctatctttaatgtagtctaacattttcatattgaaatatataatttacttaattttagcgttggtagaaagcataatgatttattcttattcttcttcatataaatgtttaatatacaatataaacaaattctttaccttaagaaggatttcccattttatattttaaaaatatatttatcaaatatttttcaaccacgtaaatctcataataataagttgtttcaaaagtaataaaatttaactccataatttttttattcgactgatcttaaagcaacacccagtgacacaactagccatttttttctttgaataaaaaaatccaattatcattgtattttttttatacaatgaaaatttcaccaaacaatgatttgtggtatttctgaagcaagtcatgttatgcaaaattctataattcccatttgacactacggaagtaactgaagatctgcttttacatgcgagacacatcttctaaagtaattttaataatagttactatattcaagatttcatatatcaaatactcaatattacttctaaaaaattaattagatataattaaaatattacttttttaattttaagtttaattgttgaatttgtgactattgatttattattctactatgtttaaattgttttatagatagtttaaagtaaatataagtaatgtagtagagtgttagagtgttaccctaaaccataaactataagatttatggtggactaattttcatatatttcttattgcttttaccttttcttggtatgtaagtccgtaactggaattactgtgggttgccatgacactctgtggtcttttggttcatgcatggatcttgcgcaagaaaaagacaaagaacaaagaaaaaagacaaaacagagagacaaaacgcaatcacacaaccaactcaaattagtcactggctgatcaagatcgccgcgtccatgtatgtctaaatgccatgcaaagcaacacgtgcttaacatgcactttaaatggctcacccatctcaacccacacacaaacacattgcctttttcttcatcatcaccacaaccacctgtatatattcattctcttccgccacctcaatttcttcacttcaacacacgtcaacctgcatatgcgtgtcatcccatgcccaaatctccatgcatgttccaaccaccttctctcttatataatacctataaatacctctaatatcactcacttctttcatcatccatccatccagagtactactactctactactataataccccaacccaactcatattcaatactactctaggatccacaaccaaaaatggcgcttcgtgtcaagaccaacaagaagccatgttgggagatgaccaaggaggaactgacctctggcaaaactgaggtgttcaactatgaggaactcctggagtttgcagagggtgacatagctaaggtttttggtccggagtttgctgtcatagacaagtaccccagaagggtgaggctgcctgctcgtgaatacctgcttgtgacaagggtcacactcatggatgccgaggtcaacaactacagagttggtgccagaatggtcactgagtatgatcttccagtgaatggcgaattgtctgagggaggtgattgtccctgggcagttctggttgagagtggacagtgcgatttgatgctgatatcatacatgggaattgatttccagaaccaaggtgacagagtttaccgtctgctcaacaccacgttgacattctatggggttgcccatgagggagagacccttgagtatgacatcagagtgaccggttttgccaaacgtttggatggtggcatctccatgttcttctttgagtatgactgctatgtcaatgggaggcttctcattgagatgagagatggctgtgctggcttcttcacaaatgaggagcttgatgcgggaaagggtgtggtgttcacaagaggggatttggctgccagagctaagattccaaagcaagatgtttctccctatgctgtcgctccctgccttcacaaaacaaaactcaacgaaaaggagatgcagaccttggttgacaaagattgggcttccgtttttggctcaaagaatggcatgccggagatcaactacaaactctgcgcacgtaagatgctcatgattgatagagtcaccagcattgaccataagggaggtgtgtacggtttgggtcagttggttggtgagaaaatcttggagagggaccattggtacttcccatgccattttgttaaggatcaagtcatggctggatctcttgtcagcgacggttgttcacaaatgctcaagatgtacatgatctggctcggtttgcaccttaccaccggaccatttgacttcagacccgtcaacggacacccgaacaaagttaggtgtaggggtcagatatctcctcataagggaaagttggtctacgtcatggagatcaaagagatgggattcgacgaggataacgatccgtacgccattgctgacgtcaacatcattgacgttgatttcgaaaagggtcaagatttcagccttgatagaatcagcgactacggaaagggggatcttaacaaaaagatcgtcgtggacttcaagggcattgctctcaagatgcagaagagatccacgaacaagaacccctccaaagttcagcccgtttttgctaacggtgcagccactgtgggaccggaagcgtccaaggccagctctggtgccagtgctagtgcttctgctgcccctgcgaagcctgctttctcagcagatgttcttgcgccaaagccagttgcacttcctgaacatatcctcaagggtgacgctctcgctccgaaagaaatgtcctggcatcccatgtcaaaacttcctggcaacccgacgccgttcttctcccctagttcttaccctccgagggcaatttgcttcatccctttccctggcaacccacttgacaacaattgcaaagctggagaaatgcctctgaactggtacaacatgtcagagttcatgtgtggaaaagttagcaactgcttgggaccagagttcgcaagatttgataagtcaaatacgagcagaagccctgcttttgatttggctcttgtgactagagttgttgaagtcacaaacatggaacatggcaagttcctgaatgttgattgcaatcccagcaaaggcacaatggtgggggagtttgactgtcctcaagatgcgtggttctttgatggttcttgcaatgatgggcacatgccttattccatcatcatggaaatcggacttcagacatccggtgttctcaccagtgtgttgaaagcaccactgacgatggacaaagatgacattctctttaggaaccttgatgcaagtgctgaaatggtgaggccagatgtggatgtgagggggaaaaccataaggaatgtgaccaagtgcactggatatgcaatgttgggaaagatggggattcacagattcacgtttgagttgtctgttgatggcgtggttttctacaaaggaagcacttcctttggatggttcactccagaggtgtttgctcagcaagctggacttgacaatgggaaaaagacggagccttggtgcaaaactaacaacacgagtgtgagaagagttgaaatcgcatcagccaaaggcaaagaacagctgactgagaaacttccagatgcaactaatgctcaagttctcagaaggtcagaacagtgtgagtatttggattacctcaacattgctcctgattctgggctgcatgggaaaggatatgcgcatggacacaaagatgttaacccacaagactggttcttctcttgtcacttttggtttgatcctgtgatgcctggatctttgggaattgagtcaatgttccagctcattgaggcatttgcggtggaccagaacataccgggagaatacaatgtgagcaatccgacctttgcccatgcccctggaaaaacggcgtggaagtaccgtggtcaattgacaccaaagaaccgtgcgatggactgtgaggtgcacatagtttcaatcacagcctctcctgaaaatggaggctacgttgacatagtggcagatggagcactttgggttgatggtctccgtgtgtatgaagccaaagaactcagagttcgtgttgtcagtgcaaaacctcaagccattccggatgttcaacaacagccacccagcgcaaaagcggaccctgggaaaactggagttgcactcagtccgactcagttgagagatgtcctgcttgaagtggacaatccattgtatcttggtgttgaaaactccaatttggtgcagtttgaatccaaacctgcaacttcttcaaggattgtcagtatcaaaccatgctccataagtgatcttggtgacaagtccttcatggaaacgtacaatgtgtcagcacctctgtacactggagcaatggccaagggaattgcgtctgcggaccttgtcattgctgctgggaagaggaagatattgggttcttttggagcgggtgggcttccaatgcaccatgtgagggcagctttggagaagatacaagcggctctgcctcaaggaccatatgctgtgaacctcattcattcaccttttgacagcaacttggaaaaggggaatgttgatctcttcctcgaaaagggcgttactgtggtggaggcttctgcattcatgaccctcactccccaagttgttcgttaccgtgcagccggactctcaaggaacgctgatgggagtgtcaacatcagaaaccgtatcattggaaaagtgtccagaacagaactcgccgaaatgttcatcagaccggctccggaacacctccttgagaaactcatagcttctggtgagataacacaagaacaagccgaacttgcccgtcgtgttcctgtcgcagacgacatcgctgttgaagctgattctggtggtcacactgacaaccgtcccatccacgtcatcttgcctttgatcatcaaccttaggaacagactgcacagagagtgtggttatcctgcgcaccttagagtcagagttggagctggaggcggtgttggctgcccacaagctgctgcggctgccctcacaatgggagctgccttcatagtgactgggactgtcaatcaagttgctaaacagtccgggacatgtgacaacgtgagaaaacaactcagtcaagccacctacagtgacatttgcatggctccagcagctgatatgtttgaggaaggtgtgaaactccaagttctcaagaagggaacaatgttcccatcaagagctaacaaattgtacgaactcttttgcaagtacgactctttcgattcaatgcctcctgctgaacttgaaaggatcgagaagaggatcttcaagagggcacttcaagaggtctgggaagagaccaaggacttttacatcaatggtttgaagaatccagagaagatacagagagcggaacatgaccccaaactcaagatgtctttgtgtttcagatggtatcttggtcttgcatcacgttgggccaacatgggtgctcctgatcgtgtcatggactatcaagtctggtgtggtccagccattggagccttcaatgacttcatcaaaggaacatatcttgatcctgctgtctctaatgagtacccatgtgttgtccagatcaaccttcagattttgcgtggtgcatgttacctgaggcgtcttaatgctctgagaaatgatccgaggattgatcttgagactgaagatgctgcctttgtctatgagccaacgaatgcgctttgagtagttagcttaatcacttaggtcaccagtatgaactaaaatgcatgtaggtgtaagagctcatggagagcatggaatattgtatccgaccatgtaacagtataataactgagctccatctcacttcttctatgaataaacaaaggatgttatgatatattaacactctatctatgcaccttattgttctatgataaatttcctcttattattataaatcatctgaatcgtgacggcttatggaatgcttcaaatagtacaaaaacaaatgtgtactataagactttctaaacaattctaactttagcattgtgaacgagacataagtgttaagaagacataacaattataatggaagaagtttgtctccatttatatattatatattacccacttatgtattatattaggatgttaaggagacataacaattataaagagagaagtttgtatccatttatatattatatactacccatttatatattatacttatccacttatttaatgtctttataaggtttgatccatgatatttctaatattttagttgatatgtatatgaaaaggtactatttgaactctcttactctgtataaaggttggatcatccttaaagtgggtctatttaattttattgcttcttacagataaaaaaaaaattatgagttggtttgataaaatattgaaggatttaaaataataataaataataaataacatataatatatgtatataaatttattataatataacatttatctataaaaaagtaaatattgtcataaatctatacaatcgtttagccttgctggaacgaatctcaattatttaaacgagagtaaacatatttgactttttggttatttaacaaattattatttaacactatatgaaattttttttttttatcagcaaagaataaaattaaattaagaaggacaatggtgtcccaatccttatacaaccaacttccacaagaaagtcaagtcagagacaacaaaaaaacaagcaaaggaaattttttaatttgagttgtcttgtttgctgcataatttatgcagtaaaacactacacataacccttttagcagtagagcaatggttgaccgtgtgcttagcttcttttattttatttttttatcagcaaagaataaataaaataaaatgagacacttcagggatgtttcaacccttatacaaaaccccaaaaacaagtttcctagcaccctaccaacgaattcgcggccgcttaattaatcacgagtggatgactgtcacgactgactcatgactgactactagtgctagcctcgaggtcgacacaactttgtataataaagttgtctagacctaggcgagtcatgagtcgtgacatgacgtcatgctcatcagactgcggccgcctcccagtatcattatagtgaaagttttggctctctcgccggtggttttttacctctatttaaaggggttttccacctaaaaattctggtatcattctcactttacttgttactttaatttctcataatctttggttgaaattatcacgcttccgcacacgatatccctacaaatttattatttgttaaacattttcaaaccgcataaaattttatgaagtcccgtctatctttaatgtagtctaacattttcatattgaaatatataatttacttaattttagcgttggtagaaagcataatgatttattcttattcttcttcatataaatgtttaatatacaatataaacaaattctttaccttaagaaggatttcccattttatattttaaaaatatatttatcaaatatttttcaaccacgtaaatctcataataataagttgtttcaaaagtaataaaatttaactccataatttttttattcgactgatcttaaagcaacacccagtgacacaactagccatttttttctttgaataaaaaaatccaattatcattgtattttttttatacaatgaaaatttcaccaaacaatgatttgtggtatttctgaagcaagtcatgttatgcaaaattctataattcccatttgacactacggaagtaactgaagatctgcttttacatgcgagacacatcttctaaagtaattttaataatagttactatattcaagatttcatatatcaaatactcaatattacttctaaaaaattaattagatataattaaaatattacttttttaattttaagtttaattgttgaatttgtgactattgatttattattctactatgtttaaattgttttatagatagtttaaagtaaatataagtaatgtagtagagtgttagagtgttaccctaaaccataaactataagatttatggtggactaattttcatatatttcttattgcttttaccttttcttggtatgtaagtccgtaactggaattactgtgggttgccatgacactctgtggtcttttggttcatgcatggatcttgcgcaagaaaaagacaaagaacaaagaaaaaagacaaaacagagagacaaaacgcaatcacacaaccaactcaaattagtcactggctgatcaagatcgccgcgtccatgtatgtctaaatgccatgcaaagcaacacgtgcttaacatgcactttaaatggctcacccatctcaacccacacacaaacacattgcctttttcttcatcatcaccacaaccacctgtatatattcattctcttccgccacctcaatttcttcacttcaacacacgtcaacctgcatatgcgtgtcatcccatgcccaaatctccatgcatgttccaaccaccttctctcttatataatacctataaatacctctaatatcactcacttctttcatcatccatccatccagagtactactactctactactataataccccaacccaactcatattcaatactactctaggatccacaaccaaaaatgcccactccagatgccactgcgcctctcaacaagccgtcagactatgctgtgtaccacgaagaggatggtcctttctggactgctgattcctctggtgtcagcagagtgaacttctctgaaactggtgtgggatctgaaggtgtcattcctgcgctcacactgattgatgtgtttgagcgtgcggtcaaacgtggtggcaataggattgcattcagaacagagaacatgccaaccttgaggcgtggagaagaggctcctgatgctttgccgctcaaagattggaagtcctggtcttggaaacagtacaaagctgatgttcacagaattgcgagggctctgatggatttgggagttgagcagcacgatgcggtctccatctttggcttcaactcaccagaatggttcctcagtgctgtcggtgcagttcatgctggtgccaagatcgctggaatctacccttcagacactcctgctcaagtgcagtacaaagccttccactctgacactgctgttgcagttgtggagaacgaacagtgcttcaagaaattcgcagaggtggttgaggatctcccttacctcaaagccattgtttgttgggattatgaagccacagacatcacaagggaagatggttcagtggttgaagtcctgacctttgctgagttcctgaagagaggtgacactgtggaagcagctgcacttgatgagagaatcagcaagattgagcccaccatgtgtgctgccctgatctacaccagtggcacaactgggagacccaaagctgtcatgatctcccatgacaaccttgtctttgaagcatctgctgtggtcccgaacttgggaggggcatgcacgaccactgctgaggaaaggattctttcctaccttcctttgtctcatgttgctggaatgatggttgacatcattgctccaatcatagcgacagcgttccacaaaggaaggatctgtgtttgttttgccagaccgtatgatttgagaactggaacccttgggcaaagactcaatgcagtggagccaaccatattccttggtgtgccacgtgtgtgggaaaagatccaagagaaattgatggctgttggtgccaaaaccactggtctcaagaagaaactcagcacggcagccaagaaacgtgggcttgaatttcaagaggaacaacagatagggagaagtggtgccaaccctggctttggaccgcttggaatctacaagaaacttttgggcctcatcaaaggaaagttggggctgaccaaatgcaagtttgcctttgctggcgcagctccaatgacccgtgaaacccttcagtactttggagcgctgaacatcaacatcaatgaggtctatggaatgtctgaatgcagtggggctgccacctggtcaactgacaaagctcatgagtggggcactgttggctatgagatgccctcctgtgaagtcagagtgttcaagattgcggaggatggcaccaagacagagtgcccaagagctgctgacatcatgcatgccacagaagaggaacaaggtgaagtttgcttccgtggaaggaacatcatgatgggatacttggccaacccgaaacttggtgatgaccatgttgctgagattgaagagaagaatgcagctgccatagatagcgaagggtggcttcactctggtgacaagggagcaatttccacaaggggaatgctcaagataacgggcagatacaaggagcttatcataggtgctggtggggagaatgtggctcctgttcccattgaagatgccatcaaggcgaggatgccttttgtttcaaatgcaatgatggttggagacaagaggaagttcatggctgtccttctgactttgaaaacggttggagcaactggagagcttcctggcacaaacaagctcatgggagcagctgcggactatggtgagaccattgaggatgcctgtgacaatgaggcgctcattgaagagataacgcagcaactcaaagagataggtgacgatggagatgtcacgccaagcaatgcagcccgtatacaaaagttcacgattttgccactcgacttcagtgtctccacagatgaactgacagcaacgttgaaattgaagagaagtgtggttgcagacaagtatgaggacatcatagaggctttctatgagagcaagtctgtctttgtgccttactcaacagttggagcttatgcaacgggtggaccagttgatgactctgttgtggatggatcattcaaaggtgactttagcatgattggggatgacgatccggatcttcagaatgtggatgtccttgaagcaattgatgaggacaactgagtagttagcttaatcacttaggtcaccagtatgaactaaaatgcatgtaggtgtaagagctcatggagagcatggaatattgtatccgaccatgtaacagtataataactgagctccatctcacttcttctatgaataaacaaaggatgttatgatatattaacactctatctatgcaccttattgttctatgataaatttcctcttattattataaatcatctgaatcgtgacggcttatggaatgcttcaaatagtacaaaaacaaatgtgtactataagactttctaaacaattctaactttagcattgtgaacgagacataagtgttaagaagacataacaattataatggaagaagtttgtctccatttatatattatatattacccacttatgtattatattaggatgttaaggagacataacaattataaagagagaagtttgtatccatttatatattatatactacccatttatatattatacttatccacttatttaatgtctttataaggtttgatccatgatatttctaatattttagttgatatgtatatgaaaaggtactatttgaactctcttactctgtataaaggttggatcatccttaaagtgggtctatttaattttattgcttcttacagataaaaaaaaaattatgagttggtttgataaaatattgaaggatttaaaataataataaataataaataacatataatatatgtatataaatttattataatataacatttatctataaaaaagtaaatattgtcataaatctatacaatcgtttagccttgctggaacgaatctcaattatttaaacgagagtaaacatatttgactttttggttatttaacaaattattatttaacactatatgaaattttttttttttatcagcaaagaataaaattaaattaagaaggacaatggtgtcccaatccttatacaaccaacttccacaagaaagtcaagtcagagacaacaaaaaaacaagcaaaggaaattttttaatttgagttgtcttgtttgctgcataatttatgcagtaaaacactacacataacccttttagcagtagagcaatggttgaccgtgtgcttagcttcttttattttatttttttatcagcaaagaataaataaaataaaatgagacacttcagggatgtttcaacccttatacaaaaccccaaaaacaagtttcctagcaccctaccaacgaattcgcggccgcttaattaatctgatcatggatgctacgtcacggcagtacaggactatcactagacctaggagctgtgctgggtaactcacatgagtcactggtcacatcagcggccgcctcccagtatcattatagtgaaagttttggctctctcgccggtggttttttacctctatttaaaggggttttccacctaaaaattctggtatcattctcactttacttgttactttaatttctcataatctttggttgaaattatcacgcttccgcacacgatatccctacaaatttattatttgttaaacattttcaaaccgcataaaattttatgaagtcccgtctatctttaatgtagtctaacattttcatattgaaatatataatttacttaattttagcgttggtagaaagcataatgatttattcttattcttcttcatataaatgtttaatatacaatataaacaaattctttaccttaagaaggatttcccattttatattttaaaaatatatttatcaaatatttttcaaccacgtaaatctcataataataagttgtttcaaaagtaataaaatttaactccataatttttttattcgactgatcttaaagcaacacccagtgacacaactagccatttttttctttgaataaaaaaatccaattatcattgtattttttttatacaatgaaaatttcaccaaacaatgatttgtggtatttctgaagcaagtcatgttatgcaaaattctataattcccatttgacactacggaagtaactgaagatctgcttttacatgcgagacacatcttctaaagtaattttaataatagttactatattcaagatttcatatatcaaatactcaatattacttctaaaaaattaattagatataattaaaatattacttttttaattttaagtttaattgttgaatttgtgactattgatttattattctactatgtttaaattgttttatagatagtttaaagtaaatataagtaatgtagtagagtgttagagtgttaccctaaaccataaactataagatttatggtggactaattttcatatatttcttattgcttttaccttttcttggtatgtaagtccgtaactggaattactgtgggttgccatgacactctgtggtcttttggttcatgcatggatcttgcgcaagaaaaagacaaagaacaaagaaaaaagacaaaacagagagacaaaacgcaatcacacaaccaactcaaattagtcactggctgatcaagatcgccgcgtccatgtatgtctaaatgccatgcaaagcaacacgtgcttaacatgcactttaaatggctcacccatctcaacccacacacaaacacattgcctttttcttcatcatcaccacaaccacctgtatatattcattctcttccgccacctcaatttcttcacttcaacacacgtcaacctgcatatgcgtgtcatcccatgcccaaatctccatgcatgttccaaccaccttctctcttatataatacctataaatacctctaatatcactcacttctttcatcatccatccatccagagtactactactctactactataataccccaacccaactcatattcaatactactctaggatccacaaccaaaaatgcttcagcacacttggcttccgaagcctcccaatctgaccctcttgtcagatgaggttcatctctggaggattcctcttgaccagcctgagtcacaacttcaagaccttgctgccaccctgagcagtgatgaattggcgagggcaaacagattctactttccagaacacagaaggcgtttcactgctgggagaggcatcctcagatccatcttgggtggatacttgggagtggaaccgggtcaagtcaagtttgattatgagtcccgtgggaaaccgatccttggtgacagatttgctgagagtggactcctgttcaacttgtctcacagccagaaccttgccttgtgtgctgtcaactacacgcgtcaaataggcattgatcttgaatatctgcgtccaacatctgacttggagtctcttgcaaagaggttctttctcccaagagaatatgaactcttgaggtcactccctgatgagcagaaacagaagattttctttcgttactggacttgcaaagaggcttatctcaaagcaacgggagatggaatagccaaacttgaagagatcgagatagcactcaccccaacagaacctgccaagctccaaacagctcctgcgtggtctctgttggagcttgtgccagatgacaattgtgttgcagctgtggctgttgcgggttttggttggcagcccaagttctggcattactgagtagttagcttaatcacttaggtcaccagtatgaactaaaatgcatgtaggtgtaagagctcatggagagcatggaatattgtatccgaccatgtaacagtataataactgagctccatctcacttcttctatgaataaacaaaggatgttatgatatattaacactctatctatgcaccttattgttctatgataaatttcctcttattattataaatcatctgaatcgtgacggcttatggaatgcttcaaatagtacaaaaacaaatgtgtactataagactttctaaacaattctaactttagcattgtgaacgagacataagtgttaagaagacataacaattataatggaagaagtttgtctccatttatatattatatattacccacttatgtattatattaggatgttaaggagacataacaattataaagagagaagtttgtatccatttatatattatatactacccatttatatattatacttatccacttatttaatgtctttataaggtttgatccatgatatttctaatattttagttgatatgtatatgaaaaggtactatttgaactctcttactctgtataaaggttggatcatccttaaagtgggtctatttaattttattgcttcttacagataaaaaaaaaattatgagttggtttgataaaatattgaaggatttaaaataataataaataataaataacatataatatatgtatataaatttattataatataacatttatctataaaaaagtaaatattgtcataaatctatacaatcgtttagccttgctggaacgaatctcaattatttaaacgagagtaaacatatttgactttttggttatttaacaaattattatttaacactatatgaaattttttttttttatcagcaaagaataaaattaaattaagaaggacaatggtgtcccaatccttatacaaccaacttccacaagaaagtcaagtcagagacaacaaaaaaacaagcaaaggaaattttttaatttgagttgtcttgtttgctgcataatttatgcagtaaaacactacacataacccttttagcagtagagcaatggttgaccgtgtgcttagcttcttttattttatttttttatcagcaaagaataaataaaataaaatgagacacttcagggatgtttcaacccttatacaaaaccccaaaaacaagtttcctagcaccctaccaacgaattcgcggccgcttaattaactactgtcactgaggccgtagacgagtacggactgatctaactagtgctagcctcgaggtcgacacccagctttcttgtacaaagtggttgcggccgcttaattaaatttaaattcaattaatgcaatcttgattttcaacaacgaaggtaatggcgtaaaagaaaaaatgtatgttattgtattgatctttcatgatgttgaagcgtgccataatatgatgatgtataattaaaatattaactgtcgcattttattgaaatggcactgttatttcaaccatatctttgattctgttacatgacacgactgcaagaagtaaataatagacgccgttgttaaagaattgctatcatatgtgcctaactagagggaatttgagcgtcagacctaatcaaatattacaaaatatctcactctgtcgccagcaatggtgtaatcagcgcagacaaatggcgtaaagatcgcggaaaaacctccccgagtggcatgatagctgcctctgtattgctgatttagtcagccttatttgacttaagggtgccctcgttagtgacaaattgctttcaaggagacagccatgccccacactttgttgaaaaacaaattgcctttggggagacggtaaagccagttgctcttcaataaggaatgtcgaggaggcaatgtaaccgcctctggtagtacacttctctaatccaaaaatcaatttgtattcaagataccgcaaaaaacttatggtttaaaccctgcaggactagtccagaaggtaattatccaagatgtagcatcaagaatccaatgtttacgggaaaaactatggaagtattatgtaagctcagcaagaagcagatcaatatgcggcacatatgcaacctatgttcaaaaatgaagaatgtacagatacaagatcctatactgccagaatacgaagaagaatacgtagaaattgaaaaagaagaaccaggcgaagaaaagaatcttgaagacgtaagcactgacgacaacaatgaaaagaagaagataaggtcggtgattgtgaaagagacatagaggacacatgtaaggtggaaaatgtaagggcggaaagtaaccttatcacaaaggaatcttatcccccactacttatccttttatatttttccgtgtcatttttgcccttgagttttcctatataaggaaccaagttcggcatttgtgaaaacaagaaaaaatttggtgtaagctattttctttgaagtactgaggatacaacttcagagaaatttgtaagtttgtaggtaccagatctggatcccaaaccatgtctccggagaggagaccagttgagattaggccagctacagcagctgatatggccgcggtttgtgatatcgttaaccattacattgagacgtctacagtgaactttaggacagagccacaaacaccacaagagtggattgatgatctagagaggttgcaagatagatacccttggttggttgctgaggttgagggtgttgtggctggtattgcttacgctgggccctggaaggctaggaacgcttacgattggacagttgagagtactgtttacgtgtcacataggcatcaaaggttgggcctaggatctacattgtacacacatttgcttaagtctatggaggcgcaaggttttaagtctgtggttgctgttataggccttccaaacgatccatctgttaggttgcatgaggctttgggatacacagcccggggtacattgcgcgcagctggatacaagcatggtggatggcatgatgttggtttttggcaaagggattttgagttgccagctcctccaaggccagttaggccagttacccaaatctgagtagttagcttaatcacctagagctcgatcggcggcaatagcttcttagcgccatcccgggttgatcctatctgtgttgaaatagttgcggtgggcaaggctctctttcagaaagacaggcggccaaaggaacccaaggtgaggtgggctatggctctcagttccttgtggaagcgcttggtctaaggtgcagaggtgttagcgggatgaagcaaaagtgtccgattgtaacaagatatgttgatcctacgtaaggatattaaagtatgtattcatcactaatataatcagtgtattccaatatgtactacgatttccaatgtctttattgtcgccgtatgtaatcggcgtcacaaaataatccccggtgactttcttttaatccaggatgaaataatatgttattataatttttgcgatttggtccgttataggaattgaagtgtgcttgaggtcggtcgccaccactcccatttcataattttacatgtatttgaaaaataaaaatttatggtattcaatttaaacacgtatacttgtaaagaatgatatcttgaaagaaatatagtttaaatatttattgataaaataacaagtcaggtattatagtccaagcaaaaacataaatttattgatgcaagtttaaattcagaaatatttcaataactgattatatcagctggtacattgccgtagatgaaagactgagtgcgatattatggtgtaatacataggaattcgtttaaacgatctgcgtctaattttcggtccaacttgcacaggaaagacgtcgaccgcggtagctcttgcccagcagactgggcttccagtcctttcgctcgatcgggtccaatgttgtcctcagctgtgaaccggaagcggacgaccaacagtggaagaactgaaaggaacgagccgtctataccttgatgatcggcctctggtgaagggtatcatcgcagccaagcaagctcatgaaaggctgatgggggaggtgtataattatgaggcccacggcgggcttattctttagggaggatctatctcgttgctcaagtgcatggcgcaaagcagttattggagtgcggattttcgttggcatattattcgccacgagttagcagacgaagagaccttcatgaacgtggccaaggccagagttaagcagatgttacgccctgctgcaggcctttctattatccaatagttggttgatctttggaaagagcctcggctgaggcccatactgaaagagatcgatggatatcgatatgccatgttgtttgctagccagaaccagatcacatccgatatgctattgcagcttgacgcagatatggaggataagttgattcatgggatcgctcaggagtagctcatccatgcacgccgacaagaacagaaattccgtcgagttaacgcagccgcttacgacggattcgaaggtcatccattcggaatgtattagtttgcaccagctccgcgtcacacctgtcttcatttgaataagatgttagcaattgtttttagctttgtcttgttgtggcagggcggcaagtgcttcagacatcattctgttttcaaattttatgctggagaacagcttcttaattcctttggaaataatagactgcgtcttaaaattcagatgtctggatatagatatgattgtaaaataacctatttaagtgtcatttagaacataagttttatgaatgttcttccattttcgtcatcgaacgaataagagtaaatacaccttttttaacattacaaataagttcttatacgttgtttatacaccgggaatcatttccattattttcgcgcaaaagtcacggatattcgtgaaagcgacataaactgcgaaatttgcggggagtgtcttgagtttgcctcgaggctagcgcatgcacatagacacacacatcatctcattgatgcttggtaataattgtcattagattgtttttatgcatagatgcactcgaaatcagccaattttagacaagtatcaaacggatgtgacttcagtacattaaaaacgtccgcaatgtgttattaagttgtctaagcgtcaatttgatttacaattgaatatatcctgccccagccagccaacagctcgatttacaattgaatatatcctgccggccggcccacgcgtgtcgaggaattctgatctggcccccatttggacgtgaatgtagacacgtcgaaataaagatttccgaattagaataatttgtttattgctttcgcctataaatacgacggatcgtaatttgtcgttttatcaaaatgtactttcattttataataacgctgcggacatctacatttttgaattgaaaaaaaattggtaattactctttctttttctccatattgaccatcatactcattgctgatccatgtagatttcccggacatgaagccatttacaattgaatatatcctgccgccgctgccgctttgcacccggtggagcttgcatgttggtttctacgcagaactgagccggttaggcagataatttccattgagaactgagccatgtgcaccttccccccaacacggtgagcgacggggcaacggagtgatccacatgggacttttaaacatcatccgtcggatggcgttgcgagagaagcagtcgatccgtgagatcagccgacgcaccgggcaggcgcgcaacacgatcgcaaagtatttgaacgcaggtacaatcgagccgacgttcacgcggaacgaccaagcaagcttggctgccatttttggggtgaggccgttcgcggccgaggggcgcagcccctggggggatgggaggcccgcgttagcgggccgggagggttcgagaagggggggcaccccccttcggcgtgcgcggtcacgcgcacagggcgcagccctggttaaaaacaaggtttataaatattggtttaaaagcaggttaaaagacaggttagcggtggccgaaaaacgggcggaaacccttgcaaatgctggattttctgcctgtggacagcccctcaaatgtcaataggtgcgcccctcatctgtcagcactctgcccctcaagtgtcaaggatcgcgcccctcatctgtcagtagtcgcgcccctcaagtgtcaataccgcagggcacttatccccaggcttgtccacatcatctgtgggaaactcgcgtaaaatcaggcgttttcgccgatttgcgaggctggccagctccacgtcgccggccgaaatcgagcctgcccctcatctgtcaacgccgcgccgggtgagtcggcccctcaagtgtcaacgtccgcccctcatctgtcagtgagggccaagttttccgcgaggtatccacaacgccggcggccgcggtgtctcgcacacggcttcgacggcgtttctggcgcgtttgcagggccatagacggccgccagcccagcggcgagggcaaccagcccggtgagcgtcggaaagggtcgacggatcttttccgctgcataaccctgcttcggggtcattatagcgattttttcggtatatccatcctttttcgcacgatatacaggattttgccaaagggttcgtgtagactttccttggtgtatccaacggcgtcagccgggcaggataggtgaagtaggcccacccgcgagcgggtgttccttcttcactgtcccttattcgcacctggcggtgctcaacgggaatcctgctctgcgaggctggccggctaccgccggcgtaacagatgagggcaagcggatggctgatgaaaccaagccaaccaggaagggcagcccacctatcaaggtgtactgccttccagacgaacgaagagcgattgaggaaaaggcggcggcggccggcatgagcctgtcggcctacctgctggccgtcggccagggctacaaaatcacgggcgtcgtggactatgagcacgtccgcgagctggcccgcatcaatggcgacctgggccgcctgggcggcctgctgaaactctggctcaccgacgacccgcgcacggcgcggttcggtgatgccacgatcctcgccctgctggcgaagatcgaagagaagcaggacgagcttggcaaggtcatgatgggcgtggtccgcccgagggcagagccatgacttttttagccgctaaaacggccggggggtgcgcgtgattgccaagcacgtccccatgcgctccatcaagaagagcgacttcgcggagctggtattcgtgcagggcaagattcggaataccaagtacgagaaggacggccagacggtctacgggaccgacttcattgccgataaggtggattatctggacaccaaggcaccaggcgggtcaaatcaggaataagggcacattgccccggcgtgagtcggggcaatcccgcaaggagggtgaatgaatcggacgtttgaccggaaggcatacaggcaagaactgatcgacgcggggttttccgccgaggatgccgaaaccatcgcaagccgcaccgtcatgcgtgcgccccgcgaaaccttccagtccgtcggctcgatggtccagcaagctacggccaagatcgagcgcgacagcgtgcaactggctccccctgccctgcccgcgccatcggccgccgtggagcgttcgcgtcgtctcgaacaggaggcggcaggtttggcgaagtcgatgaccatcgacacgcgaggaactatgacgaccaagaagcgaaaaaccgccggcgaggacctggcaaaacaggtcagcgaggccaagcaggccgcgttgctgaaacacacgaagcagcagatcaaggaaatgcagctttccttgttcgatattgcgccgtggccggacacgatgcgagcgatgccaaacgacacggcccgctctgccctgttcaccacgcgcaacaagaaaatcccgcgcgaggcgctgcaaaacaaggtcattttccacgtcaacaaggacgtgaagatcacctacaccggcgtcgagctgcgggccgacgatgacgaactggtgtggcagcaggtgttggagtacgcgaagcgcacccctatcggcgagccgatcaccttcacgttctacgagctttgccaggacctgggctggtcgatcaatggccggtattacacgaaggccgaggaatgcctgtcgcgcctacaggcgacggcgatgggcttcacgtccgaccgcgttgggcacctggaatcggtgtcgctgctgcaccgcttccgcgtcctggaccgtggcaagaaaacgtcccgttgccaggtcctgatcgacgaggaaatcgtcgtgctgtttgctggcgaccactacacgaaattcatatgggagaagtaccgcaagctgtcgccgacggcccgacggatgttcgactatttcagctcgcaccgggagccgtacccgctcaagctggaaaccttccgcctcatgtgcggatcggattccacccgcgtgaagaagtggcgcgagcaggtcggcgaagcctgcgaagagttgcgaggcagcggcctggtggaacacgcctgggtcaatgatgacctggtgcattgcaaacgctagggccttgtggggtcagttccggctgggggttcagcagccagcgctttactggcatttcaggaacaagcgggcactgctcgacgcacttgcttcgctcagtatcgctcgggacgcacggcgcgctctacgaactgccgataaacagaggattaaaattgacaattgtgattaaggctcagattcgacggcttggagcggccgacgtgcaggatttccgcgagatccgattgtcggccctgaagaaagctccagagatgttcgggtccgtttacgagcacgaggagaaaaagcccatggaggcgttcgctgaacggttgcgagatgccgtggcattcggcgcctacatcgacggcgagatcattgggctgtcggtcttcaaacaggaggacggccccaaggacgctcacaaggcgcatctgtccggcgttttcgtggagcccgaacagcgaggccgaggggtcgccggtatgctgctgcgggcgttgccggcgggtttattgctcgtgatgatcgtccgacagattccaacgggaatctggtggatgcgcatcttcatcctcggcgcacttaatatttcgctattctggagcttgttgtttatttcggtctaccgcctgccgggcggggtcgcggcgacggtaggcgctgtgcagccgctgatggtcgtgttcatctctgccgctctgctaggtagcccgatacgattgatggcggtcctgggggctatttgcggaactgcgggcgtggcgctgttggtgttgacaccaaacgcagcgctagatcctgtcggcgtcgcagcgggcctggcgggggcggtttccatggcgttcggaaccgtgctgacccgcaagtggcaacctcccgtgcctctgctcacctttaccgcctggcaactggcggccggaggacttctgctcgttccagtagctttagtgtttgatccgccaatcccgatgcctacaggaaccaatgttctcggcctggcgtggctcggcctgatcggagcgggtttaacctacttcctttggttccgggggatctcgcgactcgaacctacagttgtttccttactgggctttctcagcccccgagcgcttagtgggaatttgtaccccttatcgaaccgggagcacaggatgacgcctaacaattcattcaagccgacaccgcttcgcggcgcggcttaattcaggagttaaacatcatgagggaagcggtgatcgccgaagtatcgactcaactatcagaggtagttggcgtcatcgagcgccatctcgaaccgacgttgctggccgtacatttgtacggctccgcagtggatggcggcctgaagccacacagtgatattgatttgctggttacggtgaccgtaaggcttgatgaaacaacgcggcgagctttgatcaacgaccttttggaaacttcggcttcccctggagagagcgagattctccgcgctgtagaagtcaccattgttgtgcacgacgacatcattccgtggcgttatccagctaagcgcgaactgcaatttggagaatggcagcgcaatgacattcttgcaggtatcttcgagccagccacgatcgacattgatctggctatcttgctgacaaaagcaagagaacatagcgttgccttggtaggtccagcggcggaggaactctttgatccggttcctgaacaggatctatttgaggcgctaaatgaaaccttaacgctatggaactcgccgcccgactgggctggcgatgagcgaaatgtagtgcttacgttgtcccgcatttggtacagcgcagtaaccggcaaaatcgcgccgaaggatgtcgctgccgactgggcaatggagcgcctgccggcccagtatcagcccgtcatacttgaagctaggcaggcttatcttggacaagaagatcgcttggcctcgcgcgcagatcagttggaagaatttgttcactacgtgaaaggcgagatcaccaaggtagtcggcaaataatgtctaacaattcgttcaagccgacgccgcttcgcggcgcggcttaactcaagcgttagagagctggggaagactatgcgcgatctgttgaaggtggttctaagcctcgtcttgcgatggcatttcgatccattcccattccgcgctcaagatggcttcccctcggcagttcatcagggctaaatcaatctagccgacttgtccggtgaaatgggctgcactccaacagaaacaatcaaacaaacatacacagcgacttattcacacgagctcaaattacaacggtatatatcctgccagtcagcatcatcacaccaaaagttaggcccgaatagtttgaaattagaaagctcgcaattgaggtctacaggccaaattcgctcttagccgtacaatattactcaccggatcctaaccggtttaattaaggcgcgccatgcccgggcaagcggccgcacaagttt

SEQ ID NO: 52 - DNA, 41726 bp, Artificial sequence
  plasmid pDAB9337
gtacaaaaaagcaggcttctagacctaggtggagtcatcacgcagactatctcagcatgtgcgtagcacgcggccgcctcccagtatcattatagtgaaagttttggctctctcgccggtggttttttacctctatttaaaggggttttccacctaaaaattctggtatcattctcactttacttgttactttaatttctcataatctttggttgaaattatcacgcttccgcacacgatatccctacaaatttattatttgttaaacattttcaaaccgcataaaattttatgaagtcccgtctatctttaatgtagtctaacattttcatattgaaatatataatttacttaattttagcgttggtagaaagcataatgatttattcttattcttcttcatataaatgtttaatatacaatataaacaaattctttaccttaagaaggatttcccattttatattttaaaaatatatttatcaaatatttttcaaccacgtaaatctcataataataagttgtttcaaaagtaataaaatttaactccataatttttttattcgactgatcttaaagcaacacccagtgacacaactagccatttttttctttgaataaaaaaatccaattatcattgtattttttttatacaatgaaaatttcaccaaacaatgatttgtggtatttctgaagcaagtcatgttatgcaaaattctataattcccatttgacactacggaagtaactgaagatctgcttttacatgcgagacacatcttctaaagtaattttaataatagttactatattcaagatttcatatatcaaatactcaatattacttctaaaaaattaattagatataattaaaatattacttttttaattttaagtttaattgttgaatttgtgactattgatttattattctactatgtttaaattgttttatagatagtttaaagtaaatataagtaatgtagtagagtgttagagtgttaccctaaaccataaactataagatttatggtggactaattttcatatatttcttattgcttttaccttttcttggtatgtaagtccgtaactggaattactgtgggttgccatgacactctgtggtcttttggttcatgcatggatcttgcgcaagaaaaagacaaagaacaaagaaaaaagacaaaacagagagacaaaacgcaatcacacaaccaactcaaattagtcactggctgatcaagatcgccgcgtccatgtatgtctaaatgccatgcaaagcaacacgtgcttaacatgcactttaaatggctcacccatctcaacccacacacaaacacattgcctttttcttcatcatcaccacaaccacctgtatatattcattctcttccgccacctcaatttcttcacttcaacacacgtcaacctgcatatgcgtgtcatcccatgcccaaatctccatgcatgttccaaccaccttctctcttatataatacctataaatacctctaatatcactcacttctttcatcatccatccatccagagtactactactctactactataataccccaacccaactcatattcaatactactctaggatccacaaccaaaaatggcagcgaggctgcaagagcagaaaggaggtgagatggacacgaggattgcgatcataggcatgagcgccatacttccttgtggaaccacggtgagagagtcatgggagaccataagggctggcattgattgcctgtctgatcttcctgaggatcgtgttgatgtgactgcgtactttgacccagtcaagaccacaaaggacaaaatctactgcaagagaggaggtttcattcctgagtatgactttgatgcgcgtgagtttggtctcaacatgttccagatggaagattctgatgcgaatcagaccatctcacttctcaaggtcaaagaagcacttcaagatgctgggattgatgcacttggaaaggagaagaaaaacataggatgcgtgcttggcattggaggtggacagaagagttcacatgagttctacagcagactcaactatgtggttgtggagaaagtcttgagaaagatggggatgccagaggaagatgtcaaagtggctgtggagaagtacaaagcgaacttcccagaatggagacttgactctttccctggattccttgggaatgtcactgctggcagatgcaccaacacattcaacttggatggcatgaactgcgttgtggatgctgcatgtgcaagctccttgatagcagtcaaggttgcgattgatgaactgctctatggtgactgcgacatgatggtcactggtgcaacctgcacagacaactccattgggatgtacatggctttctcaaagacacctgtgttcagcacggacccaagtgtgagagcgtatgatgagaaaacgaaagggatgctcattggtgagggatcagccatgttggtgctcaaacgttatgcagatgcagtgagggatggtgatgagattcatgctgtgattcgtggttgtgcaagctcaagtgatggcaaagcagctggcatctacactcccacaatcagtggtcaagaggaagccttgagacgtgcatacaatcgtgcctgcgttgaccctgccactgtcactttggttgagggtcatgggactggcactccagttggagataggattgagttgactgcgttgaggaacttgtttgacaaagcgtatggtgaagggaacacagagaaagttgcagttggaagtatcaagtccagtattggtcatttgaaggctgttgctggtcttgctggaatgatcaaggtcatcatggctctcaaacacaagactttgcctggaacgatcaatgtggacaatccacccaatctctatgacaacactcccatcaatgagtcatccctctacatcaacacgatgaacagaccctggttccctccacctggtgttccgagacgtgctggaatatccagctttggctttggaggtgccaactaccatgcagtgttggaagaggctgaaccagagcacacgacagcgtacagactcaacaaacgtccacaaccggtgttgatgatggctgcaactcctgctgcgttgcagagcctttgtgaagctcagctgaaagagtttgaagctgcgatcaaggagaatgagacagtcaagaatactgcctacatcaagtgtgtcaagtttggagaacagttcaagttccctgggagcatacctgcgaccaatgcgagactgggattcttggtcaaagatgcggaggatgcgtgctccacgcttcgtgctatatgtgctcagtttgccaaagatgtgaccaaagaagcgtggaggcttccgagagaaggagtttctttccgtgccaaaggcattgccaccaatggtgctgttgctgcactcttctctggacaaggtgctcagtacacacacatgttcagtgaagttgcgatgaactggcctcagttcagacagtccattgctgcaatggacgctgcacagtccaaggttgctggaagtgacaaagactttgaaagagtctctcaagtcctgtacccaaggaaaccgtacgaacgtgagccagaacaagatcacaagaaaatctcactcacagcatacagccagccgtcaaccctggcatgtgctcttggtgcctttgagattttcaaggaagctggattcactccagactttgcagctggacacagcttgggtgagtttgctgcgctctatgcagctggttgtgttgacagagatgagttgtttgaacttgtttgcagaagggcaaggatcatgggaggcaaagatgcacctgccacacccaaaggttgcatggcagctgtcataggacccaacgcagagaacatcaaggttcaagctgccaacgtctggcttggaaactcaaactctccgtctcagactgtcattactgggtctgttgaagggattcaagctgaaagtgccagattgcagaaggaagggttcagagttgtgcctcttgcttgtgagtctgccttccattctccacagatggaaaatgccagctcagctttcaaagatgtcatatccaaggtttccttccgtacacccaaagcagaaacaaagctcttcagcaatgtttctggagagacctatccgacggatgccagagagatgctcactcaacacatgacctcatctgtgaagttcctgacccaagtgaggaacatgcaccaagctggtgcgagaatctttgttgagtttggaccgaaacaagttctcagcaaacttgtttctgaaaccctcaaagatgacccgtctgttgtcacagtgtctgtgaacccagcttctggcacggactctgacatacagttgagggatgctgcagttcagctggttgtggctggtgtcaatcttcaagggtttgacaagtgggatgctcctgatgccacgaggatgcaagccatcaagaaaaagagaaccacactcagactttcagctgccacctatgtcagtgacaagaccaagaaagtgagggatgctgccatgaacgacggaagatgtgtcacatacctcaagggtgctgcaccactcatcaaggctcctgaacctgtggttgacgaagctgccaagagggaggctgaaaggcttcagaaggagcttcaagacgctcagaggcagcttgacgacgccaaacgtgcagctgcagaagccaactccaaacttgctgctgccaaggaggaagccaagactgctgcagcttcagccaagcctgcagttgacactgctgttgtggagaaacatcgtgccatcctcaagtccatgctggctgagctggatggttatggaagtgttgatgcttcttcccttcagcaacagcaacagcaacagactgctccggcgcctgttaaagccgctgcccctgccgctcccgttgcaagtgctcctgctcccgccgtgtccaacgagttgcttgagaaagctgagacagttgtgatggaggttctcgctgccaagactggatacgaaacagacatgattgaggcggacatggagcttgagactgagttgggaattgacagcatcaagagggttgaaattctttctgaagtccaagctatgcttaacgttgaggcgaaagatgttgatgctctctctaggacgagaacagtgggtgaagttgtcaacgctatgaaggcagaaatcgctggttcttccgctccggcgccggcagctgccgcacctgcaccggctaaagcggctccagctgcagctgcaccagctgtttctaatgagctgctcgaaaaggcagaaactgttgtgatggaagtccttgctgccaaaactggctacgaaactgacatgatagaatcagacatggagcttgagacggagcttggaattgattccatcaagcgtgtggaaatcctcagtgaagtccaagccatgctcaatgtggaagctaaggatgtggatgctctctcaaggaccagaactgtcggtgaggttgtcaatgccatgaaggctgagatagctggaggctccgctcctgcgccggccgctgccgctcctggtcccgctgccgcggctccagctccagctgcagccgctccggccgtctcaaacgaactccttgaaaaagctgagaccgtcgtgatggaggtcttggcagctaaaaccggctatgagactgacatgattgagtctgacatggaattggagacagaacttgggatagacagcatcaaacgtgttgaaatcctcagtgaggtccaagctatgctgaacgtggaagcgaaggatgttgatgctctgtccagaacgaggaccgttggtgaggttgtggatgccatgaaggctgaaattgctggagggtctgcgcccgcgccagctgcagccgctcctgcacccgcagccgcggcacctgctccagctgcacctgcacctgccgtttcttcagaactcttggagaaggctgagacggttgtgatggaggttttggctgcaaagactggctatgagaccgacatgattgaatctgatatggaattggagacagagcttgggatcgattccatcaaaagagtggagatcctgagtgaagtccaagccatgctcaatgttgaagctaaggatgttgatgcactttcaagaacaaggacagtgggtgaggttgtggatgccatgaaggcggagattgctggagggagcgcgcctgcgccagctgccgcggcacctgcaccggcagccgcagctccagctccagctgcaccagcaccggccgcgcccgcgccagctgtttcatccgaactcctggaaaaggccgagacggttgtgatggaggtgctcgcagctaagactggttacgagaccgacatgattgaaagtgacatggagcttgaaaccgagttgggaatagatagcatcaaacgtgttgaaatcttgtctgaggtccaagctatgttgaacgtggaggcaaaagatgtcgatgcgctttcaagaaccagaacagtcggtgaggtcgtggacgccatgaaggctgaaattgccggaagctctgctagtgcgccagctgcagccgcacctgcacctgctgccgcggcacctgctccagctgcagccgctcctgccgtcagcaatgagttgctggagaaagccgaaacagttgtgatggaagtccttgctgcaaaaactggttacgaaacggacatgattgagtcagacatggaattggagaccgaacttggaatagattccatcaagagagtggagatcctctctgaggtgcaagccatgctcaacgttgaggctaaagatgttgatgcactcagtaggacaagaactgtgggggaagttgtcgatgcgatgaaggctgagattgctggaggctctgctcctgcgccggcagctgccgcacctgcacccgcagccgcggcaccagctgtcagcaacgaattgcttgagaaggctgaaacagttgtcatggaagtgctggctgcaaaaaccggctatgagactgacatgattgagtctgacatggaacttgagacggaattgggcattgacagcatcaagcgtgttgagatcctcagtgaagtccaagcaatgctcaatgtggaggctaaggatgtggatgccctctcaaggaccagaacagttggtgaggtcgttgatgcgatgaaggcggagatcgctggaagttccgcgcctgcgccagctgcagccgctcctgcacccgcagccgcggcaccggctccagctgcagccgcaccggccgtctcctcagaactcctggaaaaggctgagacagttgtgatggaagtccttgctgcgaaaactggctatgagaccgacatgattgaatctgacatggaactggagaccgagcttggaattgactccatcaaacgtgttgaaatcctctctgaggttcaagcgatgttgaatgtggaggccaaagatgttgatgctctttccagaacaaggacggtgggagaggtggttgatgccatgaaggctgagatagctgggggttctgctcctgcgccagctgcagccgctcctgctcccgctgccgcggcaccagctgtcagcaacgaactccttgaaaaagctgaaactgttgtgatggaggttttggctgcaaagactggatacgagactgacatgatagagtcagacatggagttggaaacagagcttgggattgatagcatcaagcgtgtggaaatcctttctgaggttcaagccatgctgaacgttgaggccaaagatgtcgatgctttgtcaaggaccagaacggttggagaagtggtcgatgccatgaaggctgagatagctggtggatcagcccctgctccggctgcagccgctcctgcaagtgccggtgctgcaccagctgtgaagattgattcagttcatggtgctgactgtgacgatttgtcactgatgcacgcaaaggtggttgacatcagaaggccagatgaactgattctggaaagaccggagaaccgtccagttcttgtcgttgacgatggctcagagttgacacttgctcttgtgagggtgttgggagcctgtgcagttgtcttgacctttgagggattgcagttggctcagagagctggtgcagctgccattcgtcatgttctggctaaggacctttcagcagaatcagctgagaaggccatcaaagaggctgagcaaagatttggagcgttgggaggcttcataagccagcaagcagaaaggtttgaaccagctgagatactgggtttcacactcatgtgtgcgaagtttgccaaagcctctctctgcactgctgtggctggaggtcgtcctgccttcatcggtgtggctaggcttgacggcagacttggattcacctctcaaggcacttctgacgcactcaagagagcacagcgtggagcgatctttggactctgcaagacaatagggttggagtggtcagaatctgatgtgttcagccgtggtgtggacattgctcaagggatgcacccagaagatgctgcagttgccatagttagggagatggcgtgtgctgacatcagaatcagagaggttgggattggagcaaaccagcaaagatgcacaatcagagctgccaagttggagactgggaaccctcagagacagatagcgaaagacgatgtgcttctggtttctggaggtgctcgtgggatcacacctctttgcatccgtgagatcacgcgtcagattgctggaggcaagtacattctgttgggtcgtagcaaagtttctgcgtctgaaccagcatggtgtgctggcatcactgatgagaaggctgtgcagaaagctgccacccaagagttgaagagggccttcagtgctggtgaaggacccaaacccactccaagggctgtcacgaaacttgtgggatctgttcttggtgctcgtgaagtgagaagctccattgctgccattgaagctctgggtggcaaagcgatctacagctcttgtgatgtgaactctgctgcagatgttgccaaagcagttagggatgcagagtcccagcttggtgccagagttagtggaatcgttcacgcttctggtgtgctccgtgatcgtctcatagagaagaaactccctgacgagtttgatgctgtctttgggaccaaagtcactgggttggagaatcttctggctgcagttgatcgtgccaacctcaaacacatggttctcttcagctcccttgctggtttccacggcaatgttggtcagtctgactatgcgatggcaaacgaagctctcaacaagatgggtttggaacttgcgaaggatgtcagtgtcaagtccatctgctttggtccctgggatggtgggatggtgacacctcaactcaagaaacagtttcaagaaatgggagttcagatcattcctcgtgaaggaggtgctgatacagttgcgaggattgtgttgggatcaagtcctgctgagatccttgttggaaactggaggacaccatccaagaaagttggaagtgacacgatcaccctgcatagaaagatcagtgccaagtccaatcccttcttggaggatcatgtcatacaaggcagaagggtgttgccaatgacccttgctattgggagccttgctgagacctgccttggactcttccctggctactctctctgggccatagatgacgcacagctcttcaaaggtgtcactgttgatggagacgtcaactgtgaagtgaccctcacaccgtccactgctccgagtgggagggtgaatgtccaagcgacgctcaagacgttctcaagtggaaaacttgttccagcctacagagctgtcatagtgttgtccaaccaaggtgctccacctgccaatgcaaccatgcagcctccgagccttgatgcagatcctgctttgcaagggtcagtctatgatggcaagactctctttcatggtcctgcgttcagaggcattgatgacgttctcagctgcaccaagagccagcttgttgccaagtgttctgctgttcctggatcagatgcagccagaggagagtttgcaactgacactgatgcacatgatccctttgtcaatgatcttgcctttcaagcaatgttggtctgggtgaggagaacgctgggacaagctgcactcccgaactccattcagaggatagtccaacacagaccggtcccacaagacaaacccttctacatcaccctcagatccaatcagagtggtggacatagccagcacaaacatgcacttcagttccacaacgaacaaggtgatctcttcattgatgttcaagcctctgtcattgcgacagactcacttgcgttctgagtagttagcttaatcacttaggtcaccagtatgaactaaaatgcatgtaggtgtaagagctcatggagagcatggaatattgtatccgaccatgtaacagtataataactgagctccatctcacttcttctatgaataaacaaaggatgttatgatatattaacactctatctatgcaccttattgttctatgataaatttcctcttattattataaatcatctgaatcgtgacggcttatggaatgcttcaaatagtacaaaaacaaatgtgtactataagactttctaaacaattctaactttagcattgtgaacgagacataagtgttaagaagacataacaattataatggaagaagtttgtctccatttatatattatatattacccacttatgtattatattaggatgttaaggagacataacaattataaagagagaagtttgtatccatttatatattatatactacccatttatatattatacttatccacttatttaatgtctttataaggtttgatccatgatatttctaatattttagttgatatgtatatgaaaaggtactatttgaactctcttactctgtataaaggttggatcatccttaaagtgggtctatttaattttattgcttcttacagataaaaaaaaaattatgagttggtttgataaaatattgaaggatttaaaataataataaataataaataacatataatatatgtatataaatttattataatataacatttatctataaaaaagtaaatattgtcataaatctatacaatcgtttagccttgctggaacgaatctcaattatttaaacgagagtaaacatatttgactttttggttatttaacaaattattatttaacactatatgaaattttttttttttatcagcaaagaataaaattaaattaagaaggacaatggtgtcccaatccttatacaaccaacttccacaagaaagtcaagtcagagacaacaaaaaaacaagcaaaggaaattttttaatttgagttgtcttgtttgctgcataatttatgcagtaaaacactacacataacccttttagcagtagagcaatggttgaccgtgtgcttagcttcttttattttatttttttatcagcaaagaataaataaaataaaatgagacacttcagggatgtttcaacccttatacaaaaccccaaaaacaagtttcctagcaccctaccaacgaattcgcggccgcttaattaagatgagtgatactcaggactcaggactcactctgctgatcactagtgctagcctcgaggtcgacacaactttgtatacaaaagttgtctagacctaggctcagcaactcatccagtcaagttcgagtcagtgagttgggcggccgcctcccagtatcattatagtgaaagttttggctctctcgccggtggttttttacctctatttaaaggggttttccacctaaaaattctggtatcattctcactttacttgttactttaatttctcataatctttggttgaaattatcacgcttccgcacacgatatccctacaaatttattatttgttaaacattttcaaaccgcataaaattttatgaagtcccgtctatctttaatgtagtctaacattttcatattgaaatatataatttacttaattttagcgttggtagaaagcataatgatttattcttattcttcttcatataaatgtttaatatacaatataaacaaattctttaccttaagaaggatttcccattttatattttaaaaatatatttatcaaatatttttcaaccacgtaaatctcataataataagttgtttcaaaagtaataaaatttaactccataatttttttattcgactgatcttaaagcaacacccagtgacacaactagccatttttttctttgaataaaaaaatccaattatcattgtattttttttatacaatgaaaatttcaccaaacaatgatttgtggtatttctgaagcaagtcatgttatgcaaaattctataattcccatttgacactacggaagtaactgaagatctgcttttacatgcgagacacatcttctaaagtaattttaataatagttactatattcaagatttcatatatcaaatactcaatattacttctaaaaaattaattagatataattaaaatattacttttttaattttaagtttaattgttgaatttgtgactattgatttattattctactatgtttaaattgttttatagatagtttaaagtaaatataagtaatgtagtagagtgttagagtgttaccctaaaccataaactataagatttatggtggactaattttcatatatttcttattgcttttaccttttcttggtatgtaagtccgtaactggaattactgtgggttgccatgacactctgtggtcttttggttcatgcatggatcttgcgcaagaaaaagacaaagaacaaagaaaaaagacaaaacagagagacaaaacgcaatcacacaaccaactcaaattagtcactggctgatcaagatcgccgcgtccatgtatgtctaaatgccatgcaaagcaacacgtgcttaacatgcactttaaatggctcacccatctcaacccacacacaaacacattgcctttttcttcatcatcaccacaaccacctgtatatattcattctcttccgccacctcaatttcttcacttcaacacacgtcaacctgcatatgcgtgtcatcccatgcccaaatctccatgcatgttccaaccaccttctctcttatataatacctataaatacctctaatatcactcacttctttcatcatccatccatccagagtactactactctactactataataccccaacccaactcatattcaatactactctaggatccacaaccaaaaatggctgcaaggaacgtgagtgcggctcatgagatgcatgacgagaagaggatagctgttgtgggcatggctgttcagtatgctggatgcaaaacgaaagacgagttctgggaagttctcatgaatggaaaagttgagagcaaagtgatcagcgacaaacgtcttggttcaaattaccgtgctgaacactacaaagctgaaaggagcaagtatgctgacaccttctgcaatgagacatatggaactcttgatgagaacgaaatagacaatgagcatgaactccttttgaaccttgccaaacaagccttggctgaaacatctgtcaaagattcaacaagatgtggcatagtttctggatgcctcagcttcccgatggacaacctccaaggtgaactcttgaatgtgtaccagaaccatgttgagaagaaacttggtgccagagttttcaaagatgcctctcactggtcagaaagagaacagtccaacaaaccagaggctggtgacagaagaatcttcatggaccctgcttcctttgttgctgaggaactcaatcttggcgctctccactactctgttgatgctgcctgtgccactgcgctctatgtgctcagactggcgcaagatcacttggtctctggtgcagctgatgtgatgctttgtggtgcaacatgcctgccggagccgtttttcatactctctgggttctcaaccttccaagccatgcctgttggaacgggtcagaatgtgtccatgccgctgcacaaagattctcaaggattgacccctggtgaaggaggttccatcatggtcctcaaacgtttggatgacgcaatcagagatggagatcacatctatggaacacttttgggagccaatgtcagcaacagtggcactggtctgccacttaaaccccttttgccgtcagagaaaaagtgcctcatggacacctacacacgtatcaatgtgcatccccacaagattcagtatgttgaatgccatgcaactgggactccacaaggtgatcgtgtggaaattgatgctgtgaaggcttgctttgaaggcaaagtcccacgttttggaaccacaaaagggaactttggacacacattggtggcagctgggtttgctggcatgtgcaaagtgcttctctccatgaagcacgggatcattccacccactccgggaatagatgacgaaacgaagatggaccctctggttgtctctggtgaggccattccctggccagaaacgaatggagaaccgaagcgtgctggtctctcagcgtttggatttggtgggaccaatgctcatgctgtctttgaggaacatgacccaagcaatgctgcatgcactggccatgactccatttctgctctctctgcacgttgtggtggtgagtcaaacatgagaatagcaatcactgggatggatgccacttttggtgctttgaaaggattggatgcttttgaaagggccatctacactggtgctcatggtgctataccactcccagaaaagagatggagattcctggggaaagacaaggacttccttgatctttgtggagtcaaagcaacaccgcatggctgttacattgaagatgttgaagttgatttccagaggctgaggactccaatgactcctgaagatatgctcttgcctcaacagcttctggctgtcaccacaattgatagggccatattggactctggcatgaagaaaggtggaaatgtggctgtctttgtggggttggggaccgatcttgaactctaccgtcaccgtgcaagggttgctctcaaggagagagtgaggcctgaagccagcaagaaactcaatgacatgatgcagtacatcaatgattgtgggacaagcacttcttacaccagctacataggcaacttggttgcaacaagggtcagttcacaatggggcttcacgggaccttccttcacaatcacagaaggcaacaattctgtgtacagatgtgctgaacttggcaaatacctcttggaaacgggagaggttgatggggttgtggttgcgggtgttgatctctgtgggagtgctgagaacctttacgtcaagtcaaggcgtttcaaggtgtctacatctgacaccccgagagccagctttgatgcagctgctgatggttactttgttggagagggctgtggtgcatttgtgctcaagcgtgagacaagctgcaccaaggatgacagaatctatgcttgcatggatgccatagttcctggaaatgttccatctgcatgtttgagagaggcattggatcaagccagagtcaagcctggagacatcgagatgttggagctttctgctgattcagcgaggcatttgaaggacccgtctgttctcccaaaggaactcactgctgaggaagagattggcggacttcagacgattcttcgtgacgatgacaagctcccaaggaatgttgcaactggaagtgtcaaggccactgttggtgacactggttatgcttctggtgctgccagtttgattaaggctgcgctttgcatctacaaccgttacctgcccagcaatggagatgactgggatgaacctgcacctgaagcaccctgggacagcacactctttgcgtgccagacctcaagagcttggttgaagaaccctggtgagagacgttatgcggctgtttccggagtcagtgaaaccagaagttgctacagtgtgctgctttctgaagcagagggacactacgagagagagaacagaatcagtttggatgaggaagcacccaagctcattgtgttgagagcagactcccatgaagagattcttggaagattggacaagataagggaaaggttcttgcagcccacgggtgctgcacccagagagtctgaattgaaggcgcaagcccgtaggatctttcttgaactccttggtgagacccttgcccaagatgcagcttcatctggaagtcagaagccccttgctctcagcttggtctccactccatccaagctccagagagaggtggaacttgcggcaaaaggcattccgagatgtctcaagatgagacgtgattggagttcccctgctggaagcagatatgcgcctgagcctttggccagtgacagagttgccttcatgtatggagaaggaaggagcccttactatggcatcacacaagacattcataggatttggcctgaacttcatgaggtcatcaatgagaaaacaaaccgtctctgggctgaaggtgacagatgggtcatgccaagggccagcttcaagagtgagcttgagtcacaacagcaagagtttgacagaaacatgattgaaatgttccgtcttggaatcctcacctcaattgccttcacaaacctggcgagagatgttctcaacatcacgcccaaagcagcctttggactcagtttgggagagatttccatgatctttgctttctccaagaaaaacggtttgataagcgatcagttgacaaaggatttgagagagtcagatgtctggaacaaagctctggctgttgagttcaatgcgctcagagaagcctggggcattccacagtctgtcccaaaagatgagttctggcaaggttacatagtgaggggaacgaaacaagacatagaagcagccatagcaccagactcaaagtatgtgaggttgaccatcatcaatgatgccaacactgctctcatcagtggaaagcctgatgcatgcaaagctgcgattgctcgtcttggtggcaacatccctgcgcttccagtcactcaaggcatgtgtgggcattgcccagaggtgggaccttacaccaaggacatcgcaaagatccacgccaaccttgagttccctgtggttgatggtcttgatctctggactaccataaaccagaagaggcttgtgccaagagccacgggtgccaaagatgaatgggctccttcatcctttggggagtatgctggacagctctatgagaaacaagccaacttccctcagatagttgaaaccatctacaagcagaactatgatgtgtttgttgaagttgggccaaacaatcacagaagcacagcagtgagaaccacgcttggaccacagagaaaccaccttgctggtgccatagacaagcagaacgaggatgcttggacgacaatagtcaagctcgtggcttcattgaaggctcaccttgttcctggagtgaccatcagtccgctctaccactccaagctcgttgcagaggctgaggcttgttatgctgcgctctgtaaaggtgagaaacccaagaaaaacaagtttgtgagaaagattcagttgaatggcagattcaacagcaaggcagaccccatctcctcagcagaccttgcatccttcccacctgcggaccctgcgattgaagctgccatctcttcaaggatcatgaagcctgtggctccgaaattctatgcgcgtctcaacattgatgagcaagatgagaccagagatccgatcttgaacaaggacaatgcgccttccagctccagctcttccagcagttcctcttccagcagttcatctccgtctcctgctccttcagctccagttcagaagaaagctgccccagctgcggagacaaaagctgttgccagtgctgatgcacttcgtagtgccctgcttgatcttgactccatgcttgcgctcagctctgcaagtgcttctggcaaccttgttgagactgcgccatctgatgccagtgtcattgtccctccgtgcaacattgctgatcttggcagcagagctttcatgaaaacttatggtgtttctgcgcctctgtacaccggtgcaatggccaagggaattgcctctgcggacttggtgatcgcagctggaaggcaaggaatccttgcgtcatttggtgctggaggccttccaatgcaagttgtgcgtgagtccattgaaaagattcaagctgccctgcccaatggaccatatgctgtcaacctcatccattctccttttgacagcaaccttgagaagggaaatgttgatctcttcttggaaaagggtgtcacttttgttgaggcttcagccttcatgacgttgacaccgcaagttgtcagatacagagcggctgggttgacgaggaatgcagatgggtcagtcaacataaggaacagaatcattgggaaagtctccagaactgagctggctgaaatgttcatgcgtcctgcacctgagcatcttttgcagaagctcattgcttctggggagatcaatcaagaacaagctgagttggccagacgtgttcctgtggctgatgacattgcggttgaagctgattctggtggacacactgacaaccgtccaatccatgtcattctgcctctgattatcaacctgagggataggcttcacagagagtgtggatacccagcaaacctgagggttcgtgttggtgctgggggtggcattgggtgtccccaagctgcgctggcaactttcaacatgggtgcctctttcattgtcactggaacagtgaaccaagttgccaaacaatctgggacgtgtgacaatgtgaggaaacagcttgcgaaagcaacttactcagatgtttgcatggcaccggcagctgacatgtttgaggaaggtgtgaaacttcaagttttgaagaaaggaacaatgttcccttcaagagccaacaaactctatgagttgttctgcaagtatgattcttttgagtccatgcctccagcagagcttgcgagggttgagaaaagaatcttcagtcgtgcattggaagaggtctgggatgagaccaagaacttctacatcaaccgtctccacaacccagagaagatacagagggctgagagggaccccaaactgaagatgtcactgtgtttcagatggtatctgtccctggcttcaaggtgggccaacactggagcttctgacagagtcatggactaccaagtttggtgtggtcctgccattggttcattcaatgatttcatcaaaggaacttaccttgatccggcagtggcaaatgagtacccgtgtgttgtgcagatcaacaaacagattcttagaggagcgtgcttcttgaggcgtcttgaaatactgagaaatgcaaggctttcagatggtgcagctgcacttgtggcgagcattgatgacacatatgtccctgctgagaagctgtgagtagttagcttaatcacttaggtcaccagtatgaactaaaatgcatgtaggtgtaagagctcatggagagcatggaatattgtatccgaccatgtaacagtataataactgagctccatctcacttcttctatgaataaacaaaggatgttatgatatattaacactctatctatgcaccttattgttctatgataaatttcctcttattattataaatcatctgaatcgtgacggcttatggaatgcttcaaatagtacaaaaacaaatgtgtactataagactttctaaacaattctaactttagcattgtgaacgagacataagtgttaagaagacataacaattataatggaagaagtttgtctccatttatatattatatattacccacttatgtattatattaggatgttaaggagacataacaattataaagagagaagtttgtatccatttatatattatatactacccatttatatattatacttatccacttatttaatgtctttataaggtttgatccatgatatttctaatattttagttgatatgtatatgaaaaggtactatttgaactctcttactctgtataaaggttggatcatccttaaagtgggtctatttaattttattgcttcttacagataaaaaaaaaattatgagttggtttgataaaatattgaaggatttaaaataataataaataataaataacatataatatatgtatataaatttattataatataacatttatctataaaaaagtaaatattgtcataaatctatacaatcgtttagccttgctggaacgaatctcaattatttaaacgagagtaaacatatttgactttttggttatttaacaaattattatttaacactatatgaaattttttttttttatcagcaaagaataaaattaaattaagaaggacaatggtgtcccaatccttatacaaccaacttccacaagaaagtcaagtcagagacaacaaaaaaacaagcaaaggaaattttttaatttgagttgtcttgtttgctgcataatttatgcagtaaaacactacacataacccttttagcagtagagcaatggttgaccgtgtgcttagcttcttttattttatttttttatcagcaaagaataaataaaataaaatgagacacttcagggatgtttcaacccttatacaaaaccccaaaaacaagtttcctagcaccctaccaacgaattcgcggccgcttaattaatctgacctgaccactagacctgagtgagtacagatgtgctactagtgctagcctcgaggtcgaccaacttttctatacaaagttgtctagacctaggactaggcactgagtgactcactgacctgactgagtgactggcggccgcctcccagtatcattatagtgaaagttttggctctctcgccggtggttttttacctctatttaaaggggttttccacctaaaaattctggtatcattctcactttacttgttactttaatttctcataatctttggttgaaattatcacgcttccgcacacgatatccctacaaatttattatttgttaaacattttcaaaccgcataaaattttatgaagtcccgtctatctttaatgtagtctaacattttcatattgaaatatataatttacttaattttagcgttggtagaaagcataatgatttattcttattcttcttcatataaatgtttaatatacaatataaacaaattctttaccttaagaaggatttcccattttatattttaaaaatatatttatcaaatatttttcaaccacgtaaatctcataataataagttgtttcaaaagtaataaaatttaactccataatttttttattcgactgatcttaaagcaacacccagtgacacaactagccatttttttctttgaataaaaaaatccaattatcattgtattttttttatacaatgaaaatttcaccaaacaatgatttgtggtatttctgaagcaagtcatgttatgcaaaattctataattcccatttgacactacggaagtaactgaagatctgcttttacatgcgagacacatcttctaaagtaattttaataatagttactatattcaagatttcatatatcaaatactcaatattacttctaaaaaattaattagatataattaaaatattacttttttaattttaagtttaattgttgaatttgtgactattgatttattattctactatgtttaaattgttttatagatagtttaaagtaaatataagtaatgtagtagagtgttagagtgttaccctaaaccataaactataagatttatggtggactaattttcatatatttcttattgcttttaccttttcttggtatgtaagtccgtaactggaattactgtgggttgccatgacactctgtggtcttttggttcatgcatggatcttgcgcaagaaaaagacaaagaacaaagaaaaaagacaaaacagagagacaaaacgcaatcacacaaccaactcaaattagtcactggctgatcaagatcgccgcgtccatgtatgtctaaatgccatgcaaagcaacacgtgcttaacatgcactttaaatggctcacccatctcaacccacacacaaacacattgcctttttcttcatcatcaccacaaccacctgtatatattcattctcttccgccacctcaatttcttcacttcaacacacgtcaacctgcatatgcgtgtcatcccatgcccaaatctccatgcatgttccaaccaccttctctcttatataatacctataaatacctctaatatcactcacttctttcatcatccatccatccagagtactactactctactactataataccccaacccaactcatattcaatactactctaggatccacaaccaaaaatggcgcttcgtgtcaagaccaacaagaagccatgttgggagatgaccaaggaggaactgacctctggcaaaactgaggtgttcaactatgaggaactcctggagtttgcagagggtgacatagctaaggtttttggtccggagtttgctgtcatagacaagtaccccagaagggtgaggctgcctgctcgtgaatacctgcttgtgacaagggtcacactcatggatgccgaggtcaacaactacagagttggtgccagaatggtcactgagtatgatcttccagtgaatggcgaattgtctgagggaggtgattgtccctgggcagttctggttgagagtggacagtgcgatttgatgctgatatcatacatgggaattgatttccagaaccaaggtgacagagtttaccgtctgctcaacaccacgttgacattctatggggttgcccatgagggagagacccttgagtatgacatcagagtgaccggttttgccaaacgtttggatggtggcatctccatgttcttctttgagtatgactgctatgtcaatgggaggcttctcattgagatgagagatggctgtgctggcttcttcacaaatgaggagcttgatgcgggaaagggtgtggtgttcacaagaggggatttggctgccagagctaagattccaaagcaagatgtttctccctatgctgtcgctccctgccttcacaaaacaaaactcaacgaaaaggagatgcagaccttggttgacaaagattgggcttccgtttttggctcaaagaatggcatgccggagatcaactacaaactctgcgcacgtaagatgctcatgattgatagagtcaccagcattgaccataagggaggtgtgtacggtttgggtcagttggttggtgagaaaatcttggagagggaccattggtacttcccatgccattttgttaaggatcaagtcatggctggatctcttgtcagcgacggttgttcacaaatgctcaagatgtacatgatctggctcggtttgcaccttaccaccggaccatttgacttcagacccgtcaacggacacccgaacaaagttaggtgtaggggtcagatatctcctcataagggaaagttggtctacgtcatggagatcaaagagatgggattcgacgaggataacgatccgtacgccattgctgacgtcaacatcattgacgttgatttcgaaaagggtcaagatttcagccttgatagaatcagcgactacggaaagggggatcttaacaaaaagatcgtcgtggacttcaagggcattgctctcaagatgcagaagagatccacgaacaagaacccctccaaagttcagcccgtttttgctaacggtgcagccactgtgggaccggaagcgtccaaggccagctctggtgccagtgctagtgcttctgctgcccctgcgaagcctgctttctcagcagatgttcttgcgccaaagccagttgcacttcctgaacatatcctcaagggtgacgctctcgctccgaaagaaatgtcctggcatcccatgtcaaaacttcctggcaacccgacgccgttcttctcccctagttcttaccctccgagggcaatttgcttcatccctttccctggcaacccacttgacaacaattgcaaagctggagaaatgcctctgaactggtacaacatgtcagagttcatgtgtggaaaagttagcaactgcttgggaccagagttcgcaagatttgataagtcaaatacgagcagaagccctgcttttgatttggctcttgtgactagagttgttgaagtcacaaacatggaacatggcaagttcctgaatgttgattgcaatcccagcaaaggcacaatggtgggggagtttgactgtcctcaagatgcgtggttctttgatggttcttgcaatgatgggcacatgccttattccatcatcatggaaatcggacttcagacatccggtgttctcaccagtgtgttgaaagcaccactgacgatggacaaagatgacattctctttaggaaccttgatgcaagtgctgaaatggtgaggccagatgtggatgtgagggggaaaaccataaggaatgtgaccaagtgcactggatatgcaatgttgggaaagatggggattcacagattcacgtttgagttgtctgttgatggcgtggttttctacaaaggaagcacttcctttggatggttcactccagaggtgtttgctcagcaagctggacttgacaatgggaaaaagacggagccttggtgcaaaactaacaacacgagtgtgagaagagttgaaatcgcatcagccaaaggcaaagaacagctgactgagaaacttccagatgcaactaatgctcaagttctcagaaggtcagaacagtgtgagtatttggattacctcaacattgctcctgattctgggctgcatgggaaaggatatgcgcatggacacaaagatgttaacccacaagactggttcttctcttgtcacttttggtttgatcctgtgatgcctggatctttgggaattgagtcaatgttccagctcattgaggcatttgcggtggaccagaacataccgggagaatacaatgtgagcaatccgacctttgcccatgcccctggaaaaacggcgtggaagtaccgtggtcaattgacaccaaagaaccgtgcgatggactgtgaggtgcacatagtttcaatcacagcctctcctgaaaatggaggctacgttgacatagtggcagatggagcactttgggttgatggtctccgtgtgtatgaagccaaagaactcagagttcgtgttgtcagtgcaaaacctcaagccattccggatgttcaacaacagccacccagcgcaaaagcggaccctgggaaaactggagttgcactcagtccgactcagttgagagatgtcctgcttgaagtggacaatccattgtatcttggtgttgaaaactccaatttggtgcagtttgaatccaaacctgcaacttcttcaaggattgtcagtatcaaaccatgctccataagtgatcttggtgacaagtccttcatggaaacgtacaatgtgtcagcacctctgtacactggagcaatggccaagggaattgcgtctgcggaccttgtcattgctgctgggaagaggaagatattgggttcttttggagcgggtgggcttccaatgcaccatgtgagggcagctttggagaagatacaagcggctctgcctcaaggaccatatgctgtgaacctcattcattcaccttttgacagcaacttggaaaaggggaatgttgatctcttcctcgaaaagggcgttactgtggtggaggcttctgcattcatgaccctcactccccaagttgttcgttaccgtgcagccggactctcaaggaacgctgatgggagtgtcaacatcagaaaccgtatcattggaaaagtgtccagaacagaactcgccgaaatgttcatcagaccggctccggaacacctccttgagaaactcatagcttctggtgagataacacaagaacaagccgaacttgcccgtcgtgttcctgtcgcagacgacatcgctgttgaagctgattctggtggtcacactgacaaccgtcccatccacgtcatcttgcctttgatcatcaaccttaggaacagactgcacagagagtgtggttatcctgcgcaccttagagtcagagttggagctggaggcggtgttggctgcccacaagctgctgcggctgccctcacaatgggagctgccttcatagtgactgggactgtcaatcaagttgctaaacagtccgggacatgtgacaacgtgagaaaacaactcagtcaagccacctacagtgacatttgcatggctccagcagctgatatgtttgaggaaggtgtgaaactccaagttctcaagaagggaacaatgttcccatcaagagctaacaaattgtacgaactcttttgcaagtacgactctttcgattcaatgcctcctgctgaacttgaaaggatcgagaagaggatcttcaagagggcacttcaagaggtctgggaagagaccaaggacttttacatcaatggtttgaagaatccagagaagatacagagagcggaacatgaccccaaactcaagatgtctttgtgtttcagatggtatcttggtcttgcatcacgttgggccaacatgggtgctcctgatcgtgtcatggactatcaagtctggtgtggtccagccattggagccttcaatgacttcatcaaaggaacatatcttgatcctgctgtctctaatgagtacccatgtgttgtccagatcaaccttcagattttgcgtggtgcatgttacctgaggcgtcttaatgctctgagaaatgatccgaggattgatcttgagactgaagatgctgcctttgtctatgagccaacgaatgcgctttgagtagttagcttaatcacttaggtcaccagtatgaactaaaatgcatgtaggtgtaagagctcatggagagcatggaatattgtatccgaccatgtaacagtataataactgagctccatctcacttcttctatgaataaacaaaggatgttatgatatattaacactctatctatgcaccttattgttctatgataaatttcctcttattattataaatcatctgaatcgtgacggcttatggaatgcttcaaatagtacaaaaacaaatgtgtactataagactttctaaacaattctaactttagcattgtgaacgagacataagtgttaagaagacataacaattataatggaagaagtttgtctccatttatatattatatattacccacttatgtattatattaggatgttaaggagacataacaattataaagagagaagtttgtatccatttatatattatatactacccatttatatattatacttatccacttatttaatgtctttataaggtttgatccatgatatttctaatattttagttgatatgtatatgaaaaggtactatttgaactctcttactctgtataaaggttggatcatccttaaagtgggtctatttaattttattgcttcttacagataaaaaaaaaattatgagttggtttgataaaatattgaaggatttaaaataataataaataataaataacatataatatatgtatataaatttattataatataacatttatctataaaaaagtaaatattgtcataaatctatacaatcgtttagccttgctggaacgaatctcaattatttaaacgagagtaaacatatttgactttttggttatttaacaaattattatttaacactatatgaaattttttttttttatcagcaaagaataaaattaaattaagaaggacaatggtgtcccaatccttatacaaccaacttccacaagaaagtcaagtcagagacaacaaaaaaacaagcaaaggaaattttttaatttgagttgtcttgtttgctgcataatttatgcagtaaaacactacacataacccttttagcagtagagcaatggttgaccgtgtgcttagcttcttttattttatttttttatcagcaaagaataaataaaataaaatgagacacttcagggatgtttcaacccttatacaaaaccccaaaaacaagtttcctagcaccctaccaacgaattcgcggccgcttaattaatcacgagtggatgactgtcacgactgactcatgactgactactagtgctagcctcgaggtcgacacaactttgtataataaagttgtctagacctaggagctgtgctgggtaactcacatgagtcactggtcacatcagcggccgcctcccagtatcattatagtgaaagttttggctctctcgccggtggttttttacctctatttaaaggggttttccacctaaaaattctggtatcattctcactttacttgttactttaatttctcataatctttggttgaaattatcacgcttccgcacacgatatccctacaaatttattatttgttaaacattttcaaaccgcataaaattttatgaagtcccgtctatctttaatgtagtctaacattttcatattgaaatatataatttacttaattttagcgttggtagaaagcataatgatttattcttattcttcttcatataaatgtttaatatacaatataaacaaattctttaccttaagaaggatttcccattttatattttaaaaatatatttatcaaatatttttcaaccacgtaaatctcataataataagttgtttcaaaagtaataaaatttaactccataatttttttattcgactgatcttaaagcaacacccagtgacacaactagccatttttttctttgaataaaaaaatccaattatcattgtattttttttatacaatgaaaatttcaccaaacaatgatttgtggtatttctgaagcaagtcatgttatgcaaaattctataattcccatttgacactacggaagtaactgaagatctgcttttacatgcgagacacatcttctaaagtaattttaataatagttactatattcaagatttcatatatcaaatactcaatattacttctaaaaaattaattagatataattaaaatattacttttttaattttaagtttaattgttgaatttgtgactattgatttattattctactatgtttaaattgttttatagatagtttaaagtaaatataagtaatgtagtagagtgttagagtgttaccctaaaccataaactataagatttatggtggactaattttcatatatttcttattgcttttaccttttcttggtatgtaagtccgtaactggaattactgtgggttgccatgacactctgtggtcttttggttcatgcatggatcttgcgcaagaaaaagacaaagaacaaagaaaaaagacaaaacagagagacaaaacgcaatcacacaaccaactcaaattagtcactggctgatcaagatcgccgcgtccatgtatgtctaaatgccatgcaaagcaacacgtgcttaacatgcactttaaatggctcacccatctcaacccacacacaaacacattgcctttttcttcatcatcaccacaaccacctgtatatattcattctcttccgccacctcaatttcttcacttcaacacacgtcaacctgcatatgcgtgtcatcccatgcccaaatctccatgcatgttccaaccaccttctctcttatataatacctataaatacctctaatatcactcacttctttcatcatccatccatccagagtactactactctactactataataccccaacccaactcatattcaatactactctaggatccacaaccaaaaatgcttcagcacacttggcttccgaagcctcccaatctgaccctcttgtcagatgaggttcatctctggaggattcctcttgaccagcctgagtcacaacttcaagaccttgctgccaccctgagcagtgatgaattggcgagggcaaacagattctactttccagaacacagaaggcgtttcactgctgggagaggcatcctcagatccatcttgggtggatacttgggagtggaaccgggtcaagtcaagtttgattatgagtcccgtgggaaaccgatccttggtgacagatttgctgagagtggactcctgttcaacttgtctcacagccagaaccttgccttgtgtgctgtcaactacacgcgtcaaataggcattgatcttgaatatctgcgtccaacatctgacttggagtctcttgcaaagaggttctttctcccaagagaatatgaactcttgaggtcactccctgatgagcagaaacagaagattttctttcgttactggacttgcaaagaggcttatctcaaagcaacgggagatggaatagccaaacttgaagagatcgagatagcactcaccccaacagaacctgccaagctccaaacagctcctgcgtggtctctgttggagcttgtgccagatgacaattgtgttgcagctgtggctgttgcgggttttggttggcagcccaagttctggcattactgagtagttagcttaatcacttaggtcaccagtatgaactaaaatgcatgtaggtgtaagagctcatggagagcatggaatattgtatccgaccatgtaacagtataataactgagctccatctcacttcttctatgaataaacaaaggatgttatgatatattaacactctatctatgcaccttattgttctatgataaatttcctcttattattataaatcatctgaatcgtgacggcttatggaatgcttcaaatagtacaaaaacaaatgtgtactataagactttctaaacaattctaactttagcattgtgaacgagacataagtgttaagaagacataacaattataatggaagaagtttgtctccatttatatattatatattacccacttatgtattatattaggatgttaaggagacataacaattataaagagagaagtttgtatccatttatatattatatactacccatttatatattatacttatccacttatttaatgtctttataaggtttgatccatgatatttctaatattttagttgatatgtatatgaaaaggtactatttgaactctcttactctgtataaaggttggatcatccttaaagtgggtctatttaattttattgcttcttacagataaaaaaaaaattatgagttggtttgataaaatattgaaggatttaaaataataataaataataaataacatataatatatgtatataaatttattataatataacatttatctataaaaaagtaaatattgtcataaatctatacaatcgtttagccttgctggaacgaatctcaattatttaaacgagagtaaacatatttgactttttggttatttaacaaattattatttaacactatatgaaattttttttttttatcagcaaagaataaaattaaattaagaaggacaatggtgtcccaatccttatacaaccaacttccacaagaaagtcaagtcagagacaacaaaaaaacaagcaaaggaaattttttaatttgagttgtcttgtttgctgcataatttatgcagtaaaacactacacataacccttttagcagtagagcaatggttgaccgtgtgcttagcttcttttattttatttttttatcagcaaagaataaataaaataaaatgagacacttcagggatgtttcaacccttatacaaaaccccaaaaacaagtttcctagcaccctaccaacgaattcgcggccgcttaattaactactgtcactgaggccgtagacgagtacggactgatctaactagtgctagcctcgaggtcgacacccagctttcttgtacaaagtggttgcggccgcttaattaaatttaaattcaattaatgcaatcttgattttcaacaacgaaggtaatggcgtaaaagaaaaaatgtatgttattgtattgatctttcatgatgttgaagcgtgccataatatgatgatgtataattaaaatattaactgtcgcattttattgaaatggcactgttatttcaaccatatctttgattctgttacatgacacgactgcaagaagtaaataatagacgccgttgttaaagaattgctatcatatgtgcctaactagagggaatttgagcgtcagacctaatcaaatattacaaaatatctcactctgtcgccagcaatggtgtaatcagcgcagacaaatggcgtaaagatcgcggaaaaacctccccgagtggcatgatagctgcctctgtattgctgatttagtcagccttatttgacttaagggtgccctcgttagtgacaaattgctttcaaggagacagccatgccccacactttgttgaaaaacaaattgcctttggggagacggtaaagccagttgctcttcaataaggaatgtcgaggaggcaatgtaaccgcctctggtagtacacttctctaatccaaaaatcaatttgtattcaagataccgcaaaaaacttatggtttaaaccctgcaggactagtccagaaggtaattatccaagatgtagcatcaagaatccaatgtttacgggaaaaactatggaagtattatgtaagctcagcaagaagcagatcaatatgcggcacatatgcaacctatgttcaaaaatgaagaatgtacagatacaagatcctatactgccagaatacgaagaagaatacgtagaaattgaaaaagaagaaccaggcgaagaaaagaatcttgaagacgtaagcactgacgacaacaatgaaaagaagaagataaggtcggtgattgtgaaagagacatagaggacacatgtaaggtggaaaatgtaagggcggaaagtaaccttatcacaaaggaatcttatcccccactacttatccttttatatttttccgtgtcatttttgcccttgagttttcctatataaggaaccaagttcggcatttgtgaaaacaagaaaaaatttggtgtaagctattttctttgaagtactgaggatacaacttcagagaaatttgtaagtttgtaggtaccagatctggatcccaaaccatgtctccggagaggagaccagttgagattaggccagctacagcagctgatatggccgcggtttgtgatatcgttaaccattacattgagacgtctacagtgaactttaggacagagccacaaacaccacaagagtggattgatgatctagagaggttgcaagatagatacccttggttggttgctgaggttgagggtgttgtggctggtattgcttacgctgggccctggaaggctaggaacgcttacgattggacagttgagagtactgtttacgtgtcacataggcatcaaaggttgggcctaggatctacattgtacacacatttgcttaagtctatggaggcgcaaggttttaagtctgtggttgctgttataggccttccaaacgatccatctgttaggttgcatgaggctttgggatacacagcccggggtacattgcgcgcagctggatacaagcatggtggatggcatgatgttggtttttggcaaagggattttgagttgccagctcctccaaggccagttaggccagttacccaaatctgagtagttagcttaatcacctagagctcgatcggcggcaatagcttcttagcgccatcccgggttgatcctatctgtgttgaaatagttgcggtgggcaaggctctctttcagaaagacaggcggccaaaggaacccaaggtgaggtgggctatggctctcagttccttgtggaagcgcttggtctaaggtgcagaggtgttagcgggatgaagcaaaagtgtccgattgtaacaagatatgttgatcctacgtaaggatattaaagtatgtattcatcactaatataatcagtgtattccaatatgtactacgatttccaatgtctttattgtcgccgtatgtaatcggcgtcacaaaataatccccggtgactttcttttaatccaggatgaaataatatgttattataatttttgcgatttggtccgttataggaattgaagtgtgcttgaggtcggtcgccaccactcccatttcataattttacatgtatttgaaaaataaaaatttatggtattcaatttaaacacgtatacttgtaaagaatgatatcttgaaagaaatatagtttaaatatttattgataaaataacaagtcaggtattatagtccaagcaaaaacataaatttattgatgcaagtttaaattcagaaatatttcaataactgattatatcagctggtacattgccgtagatgaaagactgagtgcgatattatggtgtaatacataggaattcgtttaaacgatctgcgtctaattttcggtccaacttgcacaggaaagacgtcgaccgcggtagctcttgcccagcagactgggcttccagtcctttcgctcgatcgggtccaatgttgtcctcagctgtgaaccggaagcggacgaccaacagtggaagaactgaaaggaacgagccgtctataccttgatgatcggcctctggtgaagggtatcatcgcagccaagcaagctcatgaaaggctgatgggggaggtgtataattatgaggcccacggcgggcttattctttagggaggatctatctcgttgctcaagtgcatggcgcaaagcagttattggagtgcggattttcgttggcatattattcgccacgagttagcagacgaagagaccttcatgaacgtggccaaggccagagttaagcagatgttacgccctgctgcaggcctttctattatccaatagttggttgatctttggaaagagcctcggctgaggcccatactgaaagagatcgatggatatcgatatgccatgttgtttgctagccagaaccagatcacatccgatatgctattgcagcttgacgcagatatggaggataagttgattcatgggatcgctcaggagtagctcatccatgcacgccgacaagaacagaaattccgtcgagttaacgcagccgcttacgacggattcgaaggtcatccattcggaatgtattagtttgcaccagctccgcgtcacacctgtcttcatttgaataagatgttagcaattgtttttagctttgtcttgttgtggcagggcggcaagtgcttcagacatcattctgttttcaaattttatgctggagaacagcttcttaattcctttggaaataatagactgcgtcttaaaattcagatgtctggatatagatatgattgtaaaataacctatttaagtgtcatttagaacataagttttatgaatgttcttccattttcgtcatcgaacgaataagagtaaatacaccttttttaacattacaaataagttcttatacgttgtttatacaccgggaatcatttccattattttcgcgcaaaagtcacggatattcgtgaaagcgacataaactgcgaaatttgcggggagtgtcttgagtttgcctcgaggctagcgcatgcacatagacacacacatcatctcattgatgcttggtaataattgtcattagattgtttttatgcatagatgcactcgaaatcagccaattttagacaagtatcaaacggatgtgacttcagtacattaaaaacgtccgcaatgtgttattaagttgtctaagcgtcaatttgatttacaattgaatatatcctgccccagccagccaacagctcgatttacaattgaatatatcctgccggccggcccacgcgtgtcgaggaattctgatctggcccccatttggacgtgaatgtagacacgtcgaaataaagatttccgaattagaataatttgtttattgctttcgcctataaatacgacggatcgtaatttgtcgttttatcaaaatgtactttcattttataataacgctgcggacatctacatttttgaattgaaaaaaaattggtaattactctttctttttctccatattgaccatcatactcattgctgatccatgtagatttcccggacatgaagccatttacaattgaatatatcctgccgccgctgccgctttgcacccggtggagcttgcatgttggtttctacgcagaactgagccggttaggcagataatttccattgagaactgagccatgtgcaccttccccccaacacggtgagcgacggggcaacggagtgatccacatgggacttttaaacatcatccgtcggatggcgttgcgagagaagcagtcgatccgtgagatcagccgacgcaccgggcaggcgcgcaacacgatcgcaaagtatttgaacgcaggtacaatcgagccgacgttcacgcggaacgaccaagcaagcttggctgccatttttggggtgaggccgttcgcggccgaggggcgcagcccctggggggatgggaggcccgcgttagcgggccgggagggttcgagaagggggggcaccccccttcggcgtgcgcggtcacgcgcacagggcgcagccctggttaaaaacaaggtttataaatattggtttaaaagcaggttaaaagacaggttagcggtggccgaaaaacgggcggaaacccttgcaaatgctggattttctgcctgtggacagcccctcaaatgtcaataggtgcgcccctcatctgtcagcactctgcccctcaagtgtcaaggatcgcgcccctcatctgtcagtagtcgcgcccctcaagtgtcaataccgcagggcacttatccccaggcttgtccacatcatctgtgggaaactcgcgtaaaatcaggcgttttcgccgatttgcgaggctggccagctccacgtcgccggccgaaatcgagcctgcccctcatctgtcaacgccgcgccgggtgagtcggcccctcaagtgtcaacgtccgcccctcatctgtcagtgagggccaagttttccgcgaggtatccacaacgccggcggccgcggtgtctcgcacacggcttcgacggcgtttctggcgcgtttgcagggccatagacggccgccagcccagcggcgagggcaaccagcccggtgagcgtcggaaagggtcgacggatcttttccgctgcataaccctgcttcggggtcattatagcgattttttcggtatatccatcctttttcgcacgatatacaggattttgccaaagggttcgtgtagactttccttggtgtatccaacggcgtcagccgggcaggataggtgaagtaggcccacccgcgagcgggtgttccttcttcactgtcccttattcgcacctggcggtgctcaacgggaatcctgctctgcgaggctggccggctaccgccggcgtaacagatgagggcaagcggatggctgatgaaaccaagccaaccaggaagggcagcccacctatcaaggtgtactgccttccagacgaacgaagagcgattgaggaaaaggcggcggcggccggcatgagcctgtcggcctacctgctggccgtcggccagggctacaaaatcacgggcgtcgtggactatgagcacgtccgcgagctggcccgcatcaatggcgacctgggccgcctgggcggcctgctgaaactctggctcaccgacgacccgcgcacggcgcggttcggtgatgccacgatcctcgccctgctggcgaagatcgaagagaagcaggacgagcttggcaaggtcatgatgggcgtggtccgcccgagggcagagccatgacttttttagccgctaaaacggccggggggtgcgcgtgattgccaagcacgtccccatgcgctccatcaagaagagcgacttcgcggagctggtattcgtgcagggcaagattcggaataccaagtacgagaaggacggccagacggtctacgggaccgacttcattgccgataaggtggattatctggacaccaaggcaccaggcgggtcaaatcaggaataagggcacattgccccggcgtgagtcggggcaatcccgcaaggagggtgaatgaatcggacgtttgaccggaaggcatacaggcaagaactgatcgacgcggggttttccgccgaggatgccgaaaccatcgcaagccgcaccgtcatgcgtgcgccccgcgaaaccttccagtccgtcggctcgatggtccagcaagctacggccaagatcgagcgcgacagcgtgcaactggctccccctgccctgcccgcgccatcggccgccgtggagcgttcgcgtcgtctcgaacaggaggcggcaggtttggcgaagtcgatgaccatcgacacgcgaggaactatgacgaccaagaagcgaaaaaccgccggcgaggacctggcaaaacaggtcagcgaggccaagcaggccgcgttgctgaaacacacgaagcagcagatcaaggaaatgcagctttccttgttcgatattgcgccgtggccggacacgatgcgagcgatgccaaacgacacggcccgctctgccctgttcaccacgcgcaacaagaaaatcccgcgcgaggcgctgcaaaacaaggtcattttccacgtcaacaaggacgtgaagatcacctacaccggcgtcgagctgcgggccgacgatgacgaactggtgtggcagcaggtgttggagtacgcgaagcgcacccctatcggcgagccgatcaccttcacgttctacgagctttgccaggacctgggctggtcgatcaatggccggtattacacgaaggccgaggaatgcctgtcgcgcctacaggcgacggcgatgggcttcacgtccgaccgcgttgggcacctggaatcggtgtcgctgctgcaccgcttccgcgtcctggaccgtggcaagaaaacgtcccgttgccaggtcctgatcgacgaggaaatcgtcgtgctgtttgctggcgaccactacacgaaattcatatgggagaagtaccgcaagctgtcgccgacggcccgacggatgttcgactatttcagctcgcaccgggagccgtacccgctcaagctggaaaccttccgcctcatgtgcggatcggattccacccgcgtgaagaagtggcgcgagcaggtcggcgaagcctgcgaagagttgcgaggcagcggcctggtggaacacgcctgggtcaatgatgacctggtgcattgcaaacgctagggccttgtggggtcagttccggctgggggttcagcagccagcgctttactggcatttcaggaacaagcgggcactgctcgacgcacttgcttcgctcagtatcgctcgggacgcacggcgcgctctacgaactgccgataaacagaggattaaaattgacaattgtgattaaggctcagattcgacggcttggagcggccgacgtgcaggatttccgcgagatccgattgtcggccctgaagaaagctccagagatgttcgggtccgtttacgagcacgaggagaaaaagcccatggaggcgttcgctgaacggttgcgagatgccgtggcattcggcgcctacatcgacggcgagatcattgggctgtcggtcttcaaacaggaggacggccccaaggacgctcacaaggcgcatctgtccggcgttttcgtggagcccgaacagcgaggccgaggggtcgccggtatgctgctgcgggcgttgccggcgggtttattgctcgtgatgatcgtccgacagattccaacgggaatctggtggatgcgcatcttcatcctcggcgcacttaatatttcgctattctggagcttgttgtttatttcggtctaccgcctgccgggcggggtcgcggcgacggtaggcgctgtgcagccgctgatggtcgtgttcatctctgccgctctgctaggtagcccgatacgattgatggcggtcctgggggctatttgcggaactgcgggcgtggcgctgttggtgttgacaccaaacgcagcgctagatcctgtcggcgtcgcagcgggcctggcgggggcggtttccatggcgttcggaaccgtgctgacccgcaagtggcaacctcccgtgcctctgctcacctttaccgcctggcaactggcggccggaggacttctgctcgttccagtagctttagtgtttgatccgccaatcccgatgcctacaggaaccaatgttctcggcctggcgtggctcggcctgatcggagcgggtttaacctacttcctttggttccgggggatctcgcgactcgaacctacagttgtttccttactgggctttctcagcccccgagcgcttagtgggaatttgtaccccttatcgaaccgggagcacaggatgacgcctaacaattcattcaagccgacaccgcttcgcggcgcggcttaattcaggagttaaacatcatgagggaagcggtgatcgccgaagtatcgactcaactatcagaggtagttggcgtcatcgagcgccatctcgaaccgacgttgctggccgtacatttgtacggctccgcagtggatggcggcctgaagccacacagtgatattgatttgctggttacggtgaccgtaaggcttgatgaaacaacgcggcgagctttgatcaacgaccttttggaaacttcggcttcccctggagagagcgagattctccgcgctgtagaagtcaccattgttgtgcacgacgacatcattccgtggcgttatccagctaagcgcgaactgcaatttggagaatggcagcgcaatgacattcttgcaggtatcttcgagccagccacgatcgacattgatctggctatcttgctgacaaaagcaagagaacatagcgttgccttggtaggtccagcggcggaggaactctttgatccggttcctgaacaggatctatttgaggcgctaaatgaaaccttaacgctatggaactcgccgcccgactgggctggcgatgagcgaaatgtagtgcttacgttgtcccgcatttggtacagcgcagtaaccggcaaaatcgcgccgaaggatgtcgctgccgactgggcaatggagcgcctgccggcccagtatcagcccgtcatacttgaagctaggcaggcttatcttggacaagaagatcgcttggcctcgcgcgcagatcagttggaagaatttgttcactacgtgaaaggcgagatcaccaaggtagtcggcaaataatgtctaacaattcgttcaagccgacgccgcttcgcggcgcggcttaactcaagcgttagagagctggggaagactatgcgcgatctgttgaaggtggttctaagcctcgtcttgcgatggcatttcgatccattcccattccgcgctcaagatggcttcccctcggcagttcatcagggctaaatcaatctagccgacttgtccggtgaaatgggctgcactccaacagaaacaatcaaacaaacatacacagcgacttattcacacgagctcaaattacaacggtatatatcctgccagtcagcatcatcacaccaaaagttaggcccgaatagtttgaaattagaaagctcgcaattgaggtctacaggccaaattcgctcttagccgtacaatattactcaccggatcctaaccggtttaattaaggcgcgccatgcccgggcaagcggccgcacaagttt

SEQ ID NO: 53 - DNA, 36797 bp, Artificial sequence
  plasmid pDAB9338
cttgtacaaagtggttgcggccgcttaattaaatttaaattcaattaatgcaatcttgattttcaacaacgaaggtaatggcgtaaaagaaaaaatgtatgttattgtattgatctttcatgatgttgaagcgtgccataatatgatgatgtataattaaaatattaactgtcgcattttattgaaatggcactgttatttcaaccatatctttgattctgttacatgacacgactgcaagaagtaaataatagacgccgttgttaaagaattgctatcatatgtgcctaactagagggaatttgagcgtcagacctaatcaaatattacaaaatatctcactctgtcgccagcaatggtgtaatcagcgcagacaaatggcgtaaagatcgcggaaaaacctccccgagtggcatgatagctgcctctgtattgctgatttagtcagccttatttgacttaagggtgccctcgttagtgacaaattgctttcaaggagacagccatgccccacactttgttgaaaaacaaattgcctttggggagacggtaaagccagttgctcttcaataaggaatgtcgaggaggcaatgtaaccgcctctggtagtacacttctctaatccaaaaatcaatttgtattcaagataccgcaaaaaacttatggtttaaaccctgcaggactagtccagaaggtaattatccaagatgtagcatcaagaatccaatgtttacgggaaaaactatggaagtattatgtaagctcagcaagaagcagatcaatatgcggcacatatgcaacctatgttcaaaaatgaagaatgtacagatacaagatcctatactgccagaatacgaagaagaatacgtagaaattgaaaaagaagaaccaggcgaagaaaagaatcttgaagacgtaagcactgacgacaacaatgaaaagaagaagataaggtcggtgattgtgaaagagacatagaggacacatgtaaggtggaaaatgtaagggcggaaagtaaccttatcacaaaggaatcttatcccccactacttatccttttatatttttccgtgtcatttttgcccttgagttttcctatataaggaaccaagttcggcatttgtgaaaacaagaaaaaatttggtgtaagctattttctttgaagtactgaggatacaacttcagagaaatttgtaagtttgtaggtaccagatctggatcccaaaccatgtctccggagaggagaccagttgagattaggccagctacagcagctgatatggccgcggtttgtgatatcgttaaccattacattgagacgtctacagtgaactttaggacagagccacaaacaccacaagagtggattgatgatctagagaggttgcaagatagatacccttggttggttgctgaggttgagggtgttgtggctggtattgcttacgctgggccctggaaggctaggaacgcttacgattggacagttgagagtactgtttacgtgtcacataggcatcaaaggttgggcctaggatctacattgtacacacatttgcttaagtctatggaggcgcaaggttttaagtctgtggttgctgttataggccttccaaacgatccatctgttaggttgcatgaggctttgggatacacagcccggggtacattgcgcgcagctggatacaagcatggtggatggcatgatgttggtttttggcaaagggattttgagttgccagctcctccaaggccagttaggccagttacccaaatctgagtagttagcttaatcacctagagctcgatcggcggcaatagcttcttagcgccatcccgggttgatcctatctgtgttgaaatagttgcggtgggcaaggctctctttcagaaagacaggcggccaaaggaacccaaggtgaggtgggctatggctctcagttccttgtggaagcgcttggtctaaggtgcagaggtgttagcgggatgaagcaaaagtgtccgattgtaacaagatatgttgatcctacgtaaggatattaaagtatgtattcatcactaatataatcagtgtattccaatatgtactacgatttccaatgtctttattgtcgccgtatgtaatcggcgtcacaaaataatccccggtgactttcttttaatccaggatgaaataatatgttattataatttttgcgatttggtccgttataggaattgaagtgtgcttgaggtcggtcgccaccactcccatttcataattttacatgtatttgaaaaataaaaatttatggtattcaatttaaacacgtatacttgtaaagaatgatatcttgaaagaaatatagtttaaatatttattgataaaataacaagtcaggtattatagtccaagcaaaaacataaatttattgatgcaagtttaaattcagaaatatttcaataactgattatatcagctggtacattgccgtagatgaaagactgagtgcgatattatggtgtaatacataggaattcgtttaaacgatctgcgtctaattttcggtccaacttgcacaggaaagacgtcgaccgcggtagctcttgcccagcagactgggcttccagtcctttcgctcgatcgggtccaatgttgtcctcagctgtgaaccggaagcggacgaccaacagtggaagaactgaaaggaacgagccgtctataccttgatgatcggcctctggtgaagggtatcatcgcagccaagcaagctcatgaaaggctgatgggggaggtgtataattatgaggcccacggcgggcttattctttagggaggatctatctcgttgctcaagtgcatggcgcaaagcagttattggagtgcggattttcgttggcatattattcgccacgagttagcagacgaagagaccttcatgaacgtggccaaggccagagttaagcagatgttacgccctgctgcaggcctttctattatccaatagttggttgatctttggaaagagcctcggctgaggcccatactgaaagagatcgatggatatcgatatgccatgttgtttgctagccagaaccagatcacatccgatatgctattgcagcttgacgcagatatggaggataagttgattcatgggatcgctcaggagtagctcatccatgcacgccgacaagaacagaaattccgtcgagttaacgcagccgcttacgacggattcgaaggtcatccattcggaatgtattagtttgcaccagctccgcgtcacacctgtcttcatttgaataagatgttagcaattgtttttagctttgtcttgttgtggcagggcggcaagtgcttcagacatcattctgttttcaaattttatgctggagaacagcttcttaattcctttggaaataatagactgcgtcttaaaattcagatgtctggatatagatatgattgtaaaataacctatttaagtgtcatttagaacataagttttatgaatgttcttccattttcgtcatcgaacgaataagagtaaatacaccttttttaacattacaaataagttcttatacgttgtttatacaccgggaatcatttccattattttcgcgcaaaagtcacggatattcgtgaaagcgacataaactgcgaaatttgcggggagtgtcttgagtttgcctcgaggctagcgcatgcacatagacacacacatcatctcattgatgcttggtaataattgtcattagattgtttttatgcatagatgcactcgaaatcagccaattttagacaagtatcaaacggatgtgacttcagtacattaaaaacgtccgcaatgtgttattaagttgtctaagcgtcaatttgatttacaattgaatatatcctgccccagccagccaacagctcgatttacaattgaatatatcctgccggccggcccacgcgtgtcgaggaattctgatctggcccccatttggacgtgaatgtagacacgtcgaaataaagatttccgaattagaataatttgtttattgctttcgcctataaatacgacggatcgtaatttgtcgttttatcaaaatgtactttcattttataataacgctgcggacatctacatttttgaattgaaaaaaaattggtaattactctttctttttctccatattgaccatcatactcattgctgatccatgtagatttcccggacatgaagccatttacaattgaatatatcctgccgccgctgccgctttgcacccggtggagcttgcatgttggtttctacgcagaactgagccggttaggcagataatttccattgagaactgagccatgtgcaccttccccccaacacggtgagcgacggggcaacggagtgatccacatgggacttttaaacatcatccgtcggatggcgttgcgagagaagcagtcgatccgtgagatcagccgacgcaccgggcaggcgcgcaacacgatcgcaaagtatttgaacgcaggtacaatcgagccgacgttcacgcggaacgaccaagcaagcttggctgccatttttggggtgaggccgttcgcggccgaggggcgcagcccctggggggatgggaggcccgcgttagcgggccgggagggttcgagaagggggggcaccccccttcggcgtgcgcggtcacgcgcacagggcgcagccctggttaaaaacaaggtttataaatattggtttaaaagcaggttaaaagacaggttagcggtggccgaaaaacgggcggaaacccttgcaaatgctggattttctgcctgtggacagcccctcaaatgtcaataggtgcgcccctcatctgtcagcactctgcccctcaagtgtcaaggatcgcgcccctcatctgtcagtagtcgcgcccctcaagtgtcaataccgcagggcacttatccccaggcttgtccacatcatctgtgggaaactcgcgtaaaatcaggcgttttcgccgatttgcgaggctggccagctccacgtcgccggccgaaatcgagcctgcccctcatctgtcaacgccgcgccgggtgagtcggcccctcaagtgtcaacgtccgcccctcatctgtcagtgagggccaagttttccgcgaggtatccacaacgccggcggccgcggtgtctcgcacacggcttcgacggcgtttctggcgcgtttgcagggccatagacggccgccagcccagcggcgagggcaaccagcccggtgagcgtcggaaagggtcgacggatcttttccgctgcataaccctgcttcggggtcattatagcgattttttcggtatatccatcctttttcgcacgatatacaggattttgccaaagggttcgtgtagactttccttggtgtatccaacggcgtcagccgggcaggataggtgaagtaggcccacccgcgagcgggtgttccttcttcactgtcccttattcgcacctggcggtgctcaacgggaatcctgctctgcgaggctggccggctaccgccggcgtaacagatgagggcaagcggatggctgatgaaaccaagccaaccaggaagggcagcccacctatcaaggtgtactgccttccagacgaacgaagagcgattgaggaaaaggcggcggcggccggcatgagcctgtcggcctacctgctggccgtcggccagggctacaaaatcacgggcgtcgtggactatgagcacgtccgcgagctggcccgcatcaatggcgacctgggccgcctgggcggcctgctgaaactctggctcaccgacgacccgcgcacggcgcggttcggtgatgccacgatcctcgccctgctggcgaagatcgaagagaagcaggacgagcttggcaaggtcatgatgggcgtggtccgcccgagggcagagccatgacttttttagccgctaaaacggccggggggtgcgcgtgattgccaagcacgtccccatgcgctccatcaagaagagcgacttcgcggagctggtattcgtgcagggcaagattcggaataccaagtacgagaaggacggccagacggtctacgggaccgacttcattgccgataaggtggattatctggacaccaaggcaccaggcgggtcaaatcaggaataagggcacattgccccggcgtgagtcggggcaatcccgcaaggagggtgaatgaatcggacgtttgaccggaaggcatacaggcaagaactgatcgacgcggggttttccgccgaggatgccgaaaccatcgcaagccgcaccgtcatgcgtgcgccccgcgaaaccttccagtccgtcggctcgatggtccagcaagctacggccaagatcgagcgcgacagcgtgcaactggctccccctgccctgcccgcgccatcggccgccgtggagcgttcgcgtcgtctcgaacaggaggcggcaggtttggcgaagtcgatgaccatcgacacgcgaggaactatgacgaccaagaagcgaaaaaccgccggcgaggacctggcaaaacaggtcagcgaggccaagcaggccgcgttgctgaaacacacgaagcagcagatcaaggaaatgcagctttccttgttcgatattgcgccgtggccggacacgatgcgagcgatgccaaacgacacggcccgctctgccctgttcaccacgcgcaacaagaaaatcccgcgcgaggcgctgcaaaacaaggtcattttccacgtcaacaaggacgtgaagatcacctacaccggcgtcgagctgcgggccgacgatgacgaactggtgtggcagcaggtgttggagtacgcgaagcgcacccctatcggcgagccgatcaccttcacgttctacgagctttgccaggacctgggctggtcgatcaatggccggtattacacgaaggccgaggaatgcctgtcgcgcctacaggcgacggcgatgggcttcacgtccgaccgcgttgggcacctggaatcggtgtcgctgctgcaccgcttccgcgtcctggaccgtggcaagaaaacgtcccgttgccaggtcctgatcgacgaggaaatcgtcgtgctgtttgctggcgaccactacacgaaattcatatgggagaagtaccgcaagctgtcgccgacggcccgacggatgttcgactatttcagctcgcaccgggagccgtacccgctcaagctggaaaccttccgcctcatgtgcggatcggattccacccgcgtgaagaagtggcgcgagcaggtcggcgaagcctgcgaagagttgcgaggcagcggcctggtggaacacgcctgggtcaatgatgacctggtgcattgcaaacgctagggccttgtggggtcagttccggctgggggttcagcagccagcgctttactggcatttcaggaacaagcgggcactgctcgacgcacttgcttcgctcagtatcgctcgggacgcacggcgcgctctacgaactgccgataaacagaggattaaaattgacaattgtgattaaggctcagattcgacggcttggagcggccgacgtgcaggatttccgcgagatccgattgtcggccctgaagaaagctccagagatgttcgggtccgtttacgagcacgaggagaaaaagcccatggaggcgttcgctgaacggttgcgagatgccgtggcattcggcgcctacatcgacggcgagatcattgggctgtcggtcttcaaacaggaggacggccccaaggacgctcacaaggcgcatctgtccggcgttttcgtggagcccgaacagcgaggccgaggggtcgccggtatgctgctgcgggcgttgccggcgggtttattgctcgtgatgatcgtccgacagattccaacgggaatctggtggatgcgcatcttcatcctcggcgcacttaatatttcgctattctggagcttgttgtttatttcggtctaccgcctgccgggcggggtcgcggcgacggtaggcgctgtgcagccgctgatggtcgtgttcatctctgccgctctgctaggtagcccgatacgattgatggcggtcctgggggctatttgcggaactgcgggcgtggcgctgttggtgttgacaccaaacgcagcgctagatcctgtcggcgtcgcagcgggcctggcgggggcggtttccatggcgttcggaaccgtgctgacccgcaagtggcaacctcccgtgcctctgctcacctttaccgcctggcaactggcggccggaggacttctgctcgttccagtagctttagtgtttgatccgccaatcccgatgcctacaggaaccaatgttctcggcctggcgtggctcggcctgatcggagcgggtttaacctacttcctttggttccgggggatctcgcgactcgaacctacagttgtttccttactgggctttctcagcccccgagcgcttagtgggaatttgtaccccttatcgaaccgggagcacaggatgacgcctaacaattcattcaagccgacaccgcttcgcggcgcggcttaattcaggagttaaacatcatgagggaagcggtgatcgccgaagtatcgactcaactatcagaggtagttggcgtcatcgagcgccatctcgaaccgacgttgctggccgtacatttgtacggctccgcagtggatggcggcctgaagccacacagtgatattgatttgctggttacggtgaccgtaaggcttgatgaaacaacgcggcgagctttgatcaacgaccttttggaaacttcggcttcccctggagagagcgagattctccgcgctgtagaagtcaccattgttgtgcacgacgacatcattccgtggcgttatccagctaagcgcgaactgcaatttggagaatggcagcgcaatgacattcttgcaggtatcttcgagccagccacgatcgacattgatctggctatcttgctgacaaaagcaagagaacatagcgttgccttggtaggtccagcggcggaggaactctttgatccggttcctgaacaggatctatttgaggcgctaaatgaaaccttaacgctatggaactcgccgcccgactgggctggcgatgagcgaaatgtagtgcttacgttgtcccgcatttggtacagcgcagtaaccggcaaaatcgcgccgaaggatgtcgctgccgactgggcaatggagcgcctgccggcccagtatcagcccgtcatacttgaagctaggcaggcttatcttggacaagaagatcgcttggcctcgcgcgcagatcagttggaagaatttgttcactacgtgaaaggcgagatcaccaaggtagtcggcaaataatgtctaacaattcgttcaagccgacgccgcttcgcggcgcggcttaactcaagcgttagagagctggggaagactatgcgcgatctgttgaaggtggttctaagcctcgtcttgcgatggcatttcgatccattcccattccgcgctcaagatggcttcccctcggcagttcatcagggctaaatcaatctagccgacttgtccggtgaaatgggctgcactccaacagaaacaatcaaacaaacatacacagcgacttattcacacgagctcaaattacaacggtatatatcctgccagtcagcatcatcacaccaaaagttaggcccgaatagtttgaaattagaaagctcgcaattgaggtctacaggccaaattcgctcttagccgtacaatattactcaccggatcctaaccggtttaattaaggcgcgccatgcccgggcaagcggccgcacaagtttgtacaaaaaagcaggcttctagacctaggtggagtcatcacgcagactatctcagcatgtgcgtagcacgcggccgcctcccagtatcattatagtgaaagttttggctctctcgccggtggttttttacctctatttaaaggggttttccacctaaaaattctggtatcattctcactttacttgttactttaatttctcataatctttggttgaaattatcacgcttccgcacacgatatccctacaaatttattatttgttaaacattttcaaaccgcataaaattttatgaagtcccgtctatctttaatgtagtctaacattttcatattgaaatatataatttacttaattttagcgttggtagaaagcataatgatttattcttattcttcttcatataaatgtttaatatacaatataaacaaattctttaccttaagaaggatttcccattttatattttaaaaatatatttatcaaatatttttcaaccacgtaaatctcataataataagttgtttcaaaagtaataaaatttaactccataatttttttattcgactgatcttaaagcaacacccagtgacacaactagccatttttttctttgaataaaaaaatccaattatcattgtattttttttatacaatgaaaatttcaccaaacaatgatttgtggtatttctgaagcaagtcatgttatgcaaaattctataattcccatttgacactacggaagtaactgaagatctgcttttacatgcgagacacatcttctaaagtaattttaataatagttactatattcaagatttcatatatcaaatactcaatattacttctaaaaaattaattagatataattaaaatattacttttttaattttaagtttaattgttgaatttgtgactattgatttattattctactatgtttaaattgttttatagatagtttaaagtaaatataagtaatgtagtagagtgttagagtgttaccctaaaccataaactataagatttatggtggactaattttcatatatttcttattgcttttaccttttcttggtatgtaagtccgtaactggaattactgtgggttgccatgacactctgtggtcttttggttcatgcatggatcttgcgcaagaaaaagacaaagaacaaagaaaaaagacaaaacagagagacaaaacgcaatcacacaaccaactcaaattagtcactggctgatcaagatcgccgcgtccatgtatgtctaaatgccatgcaaagcaacacgtgcttaacatgcactttaaatggctcacccatctcaacccacacacaaacacattgcctttttcttcatcatcaccacaaccacctgtatatattcattctcttccgccacctcaatttcttcacttcaacacacgtcaacctgcatatgcgtgtcatcccatgcccaaatctccatgcatgttccaaccaccttctctcttatataatacctataaatacctctaatatcactcacttctttcatcatccatccatccagagtactactactctactactataataccccaacccaactcatattcaatactactctaggatccacaaccaaaaatggcagcgaggctgcaagagcagaaaggaggtgagatggacacgaggattgcgatcataggcatgagcgccatacttccttgtggaaccacggtgagagagtcatgggagaccataagggctggcattgattgcctgtctgatcttcctgaggatcgtgttgatgtgactgcgtactttgacccagtcaagaccacaaaggacaaaatctactgcaagagaggaggtttcattcctgagtatgactttgatgcgcgtgagtttggtctcaacatgttccagatggaagattctgatgcgaatcagaccatctcacttctcaaggtcaaagaagcacttcaagatgctgggattgatgcacttggaaaggagaagaaaaacataggatgcgtgcttggcattggaggtggacagaagagttcacatgagttctacagcagactcaactatgtggttgtggagaaagtcttgagaaagatggggatgccagaggaagatgtcaaagtggctgtggagaagtacaaagcgaacttcccagaatggagacttgactctttccctggattccttgggaatgtcactgctggcagatgcaccaacacattcaacttggatggcatgaactgcgttgtggatgctgcatgtgcaagctccttgatagcagtcaaggttgcgattgatgaactgctctatggtgactgcgacatgatggtcactggtgcaacctgcacagacaactccattgggatgtacatggctttctcaaagacacctgtgttcagcacggacccaagtgtgagagcgtatgatgagaaaacgaaagggatgctcattggtgagggatcagccatgttggtgctcaaacgttatgcagatgcagtgagggatggtgatgagattcatgctgtgattcgtggttgtgcaagctcaagtgatggcaaagcagctggcatctacactcccacaatcagtggtcaagaggaagccttgagacgtgcatacaatcgtgcctgcgttgaccctgccactgtcactttggttgagggtcatgggactggcactccagttggagataggattgagttgactgcgttgaggaacttgtttgacaaagcgtatggtgaagggaacacagagaaagttgcagttggaagtatcaagtccagtattggtcatttgaaggctgttgctggtcttgctggaatgatcaaggtcatcatggctctcaaacacaagactttgcctggaacgatcaatgtggacaatccacccaatctctatgacaacactcccatcaatgagtcatccctctacatcaacacgatgaacagaccctggttccctccacctggtgttccgagacgtgctggaatatccagctttggctttggaggtgccaactaccatgcagtgttggaagaggctgaaccagagcacacgacagcgtacagactcaacaaacgtccacaaccggtgttgatgatggctgcaactcctgctgcgttgcagagcctttgtgaagctcagctgaaagagtttgaagctgcgatcaaggagaatgagacagtcaagaatactgcctacatcaagtgtgtcaagtttggagaacagttcaagttccctgggagcatacctgcgaccaatgcgagactgggattcttggtcaaagatgcggaggatgcgtgctccacgcttcgtgctatatgtgctcagtttgccaaagatgtgaccaaagaagcgtggaggcttccgagagaaggagtttctttccgtgccaaaggcattgccaccaatggtgctgttgctgcactcttctctggacaaggtgctcagtacacacacatgttcagtgaagttgcgatgaactggcctcagttcagacagtccattgctgcaatggacgctgcacagtccaaggttgctggaagtgacaaagactttgaaagagtctctcaagtcctgtacccaaggaaaccgtacgaacgtgagccagaacaagatcacaagaaaatctcactcacagcatacagccagccgtcaaccctggcatgtgctcttggtgcctttgagattttcaaggaagctggattcactccagactttgcagctggacacagcttgggtgagtttgctgcgctctatgcagctggttgtgttgacagagatgagttgtttgaacttgtttgcagaagggcaaggatcatgggaggcaaagatgcacctgccacacccaaaggttgcatggcagctgtcataggacccaacgcagagaacatcaaggttcaagctgccaacgtctggcttggaaactcaaactctccgtctcagactgtcattactgggtctgttgaagggattcaagctgaaagtgccagattgcagaaggaagggttcagagttgtgcctcttgcttgtgagtctgccttccattctccacagatggaaaatgccagctcagctttcaaagatgtcatatccaaggtttccttccgtacacccaaagcagaaacaaagctcttcagcaatgtttctggagagacctatccgacggatgccagagagatgctcactcaacacatgacctcatctgtgaagttcctgacccaagtgaggaacatgcaccaagctggtgcgagaatctttgttgagtttggaccgaaacaagttctcagcaaacttgtttctgaaaccctcaaagatgacccgtctgttgtcacagtgtctgtgaacccagcttctggcacggactctgacatacagttgagggatgctgcagttcagctggttgtggctggtgtcaatcttcaagggtttgacaagtgggatgctcctgatgccacgaggatgcaagccatcaagaaaaagagaaccacactcagactttcagctgccacctatgtcagtgacaagaccaagaaagtgagggatgctgccatgaacgacggaagatgtgtcacatacctcaagggtgctgcaccactcatcaaggctcctgaacctgtggttgacgaagctgccaagagggaggctgaaaggcttcagaaggagcttcaagacgctcagaggcagcttgacgacgccaaacgtgcagctgcagaagccaactccaaacttgctgctgccaaggaggaagccaagactgctgcagcttcagccaagcctgcagttgacactgctgttgtggagaaacatcgtgccatcctcaagtccatgctggctgagctggatggttatggaagtgttgatgcttcttcccttcagcaacagcaacagcaacagactgctccggcgcctgttaaagccgctgcccctgccgctcccgttgcaagtgctcctgctcccgccgtgtccaacgagttgcttgagaaagctgagacagttgtgatggaggttctcgctgccaagactggatacgaaacagacatgattgaggcggacatggagcttgagactgagttgggaattgacagcatcaagagggttgaaattctttctgaagtccaagctatgcttaacgttgaggcgaaagatgttgatgctctctctaggacgagaacagtgggtgaagttgtcaacgctatgaaggcagaaatcgctggttcttccgctccggcgccggcagctgccgcacctgcaccggctaaagcggctccagctgcagctgcaccagctgtttctaatgagctgctcgaaaaggcagaaactgttgtgatggaagtccttgctgccaaaactggctacgaaactgacatgatagaatcagacatggagcttgagacggagcttggaattgattccatcaagcgtgtggaaatcctcagtgaagtccaagccatgctcaatgtggaagctaaggatgtggatgctctctcaaggaccagaactgtcggtgaggttgtcaatgccatgaaggctgagatagctggaggctccgctcctgcgccggccgctgccgctcctggtcccgctgccgcggctccagctccagctgcagccgctccggccgtctcaaacgaactccttgaaaaagctgagaccgtcgtgatggaggtcttggcagctaaaaccggctatgagactgacatgattgagtctgacatggaattggagacagaacttgggatagacagcatcaaacgtgttgaaatcctcagtgaggtccaagctatgctgaacgtggaagcgaaggatgttgatgctctgtccagaacgaggaccgttggtgaggttgtggatgccatgaaggctgaaattgctggagggtctgcgcccgcgccagctgcagccgctcctgcacccgcagccgcggcacctgctccagctgcacctgcacctgccgtttcttcagaactcttggagaaggctgagacggttgtgatggaggttttggctgcaaagactggctatgagaccgacatgattgaatctgatatggaattggagacagagcttgggatcgattccatcaaaagagtggagatcctgagtgaagtccaagccatgctcaatgttgaagctaaggatgttgatgcactttcaagaacaaggacagtgggtgaggttgtggatgccatgaaggcggagattgctggagggagcgcgcctgcgccagctgccgcggcacctgcaccggcagccgcagctccagctccagctgcaccagcaccggccgcgcccgcgccagctgtttcatccgaactcctggaaaaggccgagacggttgtgatggaggtgctcgcagctaagactggttacgagaccgacatgattgaaagtgacatggagcttgaaaccgagttgggaatagatagcatcaaacgtgttgaaatcttgtctgaggtccaagctatgttgaacgtggaggcaaaagatgtcgatgcgctttcaagaaccagaacagtcggtgaggtcgtggacgccatgaaggctgaaattgccggaagctctgctagtgcgccagctgcagccgcacctgcacctgctgccgcggcacctgctccagctgcagccgctcctgccgtcagcaatgagttgctggagaaagccgaaacagttgtgatggaagtccttgctgcaaaaactggttacgaaacggacatgattgagtcagacatggaattggagaccgaacttggaatagattccatcaagagagtggagatcctctctgaggtgcaagccatgctcaacgttgaggctaaagatgttgatgcactcagtaggacaagaactgtgggggaagttgtcgatgcgatgaaggctgagattgctggaggctctgctcctgcgccggcagctgccgcacctgcacccgcagccgcggcaccagctgtcagcaacgaattgcttgagaaggctgaaacagttgtcatggaagtgctggctgcaaaaaccggctatgagactgacatgattgagtctgacatggaacttgagacggaattgggcattgacagcatcaagcgtgttgagatcctcagtgaagtccaagcaatgctcaatgtggaggctaaggatgtggatgccctctcaaggaccagaacagttggtgaggtcgttgatgcgatgaaggcggagatcgctggaagttccgcgcctgcgccagctgcagccgctcctgcacccgcagccgcggcaccggctccagctgcagccgcaccggccgtctcctcagaactcctggaaaaggctgagacagttgtgatggaagtccttgctgcgaaaactggctatgagaccgacatgattgaatctgacatggaactggagaccgagcttggaattgactccatcaaacgtgttgaaatcctctctgaggttcaagcgatgttgaatgtggaggccaaagatgttgatgctctttccagaacaaggacggtgggagaggtggttgatgccatgaaggctgagatagctgggggttctgctcctgcgccagctgcagccgctcctgctcccgctgccgcggcaccagctgtcagcaacgaactccttgaaaaagctgaaactgttgtgatggaggttttggctgcaaagactggatacgagactgacatgatagagtcagacatggagttggaaacagagcttgggattgatagcatcaagcgtgtggaaatcctttctgaggttcaagccatgctgaacgttgaggccaaagatgtcgatgctttgtcaaggaccagaacggttggagaagtggtcgatgccatgaaggctgagatagctggtggatcagcccctgctccggctgcagccgctcctgcaagtgccggtgctgcaccagctgtgaagattgattcagttcatggtgctgactgtgacgatttgtcactgatgcacgcaaaggtggttgacatcagaaggccagatgaactgattctggaaagaccggagaaccgtccagttcttgtcgttgacgatggctcagagttgacacttgctcttgtgagggtgttgggagcctgtgcagttgtcttgacctttgagggattgcagttggctcagagagctggtgcagctgccattcgtcatgttctggctaaggacctttcagcagaatcagctgagaaggccatcaaagaggctgagcaaagatttggagcgttgggaggcttcataagccagcaagcagaaaggtttgaaccagctgagatactgggtttcacactcatgtgtgcgaagtttgccaaagcctctctctgcactgctgtggctggaggtcgtcctgccttcatcggtgtggctaggcttgacggcagacttggattcacctctcaaggcacttctgacgcactcaagagagcacagcgtggagcgatctttggactctgcaagacaatagggttggagtggtcagaatctgatgtgttcagccgtggtgtggacattgctcaagggatgcacccagaagatgctgcagttgccatagttagggagatggcgtgtgctgacatcagaatcagagaggttgggattggagcaaaccagcaaagatgcacaatcagagctgccaagttggagactgggaaccctcagagacagatagcgaaagacgatgtgcttctggtttctggaggtgctcgtgggatcacacctctttgcatccgtgagatcacgcgtcagattgctggaggcaagtacattctgttgggtcgtagcaaagtttctgcgtctgaaccagcatggtgtgctggcatcactgatgagaaggctgtgcagaaagctgccacccaagagttgaagagggccttcagtgctggtgaaggacccaaacccactccaagggctgtcacgaaacttgtgggatctgttcttggtgctcgtgaagtgagaagctccattgctgccattgaagctctgggtggcaaagcgatctacagctcttgtgatgtgaactctgctgcagatgttgccaaagcagttagggatgcagagtcccagcttggtgccagagttagtggaatcgttcacgcttctggtgtgctccgtgatcgtctcatagagaagaaactccctgacgagtttgatgctgtctttgggaccaaagtcactgggttggagaatcttctggctgcagttgatcgtgccaacctcaaacacatggttctcttcagctcccttgctggtttccacggcaatgttggtcagtctgactatgcgatggcaaacgaagctctcaacaagatgggtttggaacttgcgaaggatgtcagtgtcaagtccatctgctttggtccctgggatggtgggatggtgacacctcaactcaagaaacagtttcaagaaatgggagttcagatcattcctcgtgaaggaggtgctgatacagttgcgaggattgtgttgggatcaagtcctgctgagatccttgttggaaactggaggacaccatccaagaaagttggaagtgacacgatcaccctgcatagaaagatcagtgccaagtccaatcccttcttggaggatcatgtcatacaaggcagaagggtgttgccaatgacccttgctattgggagccttgctgagacctgccttggactcttccctggctactctctctgggccatagatgacgcacagctcttcaaaggtgtcactgttgatggagacgtcaactgtgaagtgaccctcacaccgtccactgctccgagtgggagggtgaatgtccaagcgacgctcaagacgttctcaagtggaaaacttgttccagcctacagagctgtcatagtgttgtccaaccaaggtgctccacctgccaatgcaaccatgcagcctccgagccttgatgcagatcctgctttgcaagggtcagtctatgatggcaagactctctttcatggtcctgcgttcagaggcattgatgacgttctcagctgcaccaagagccagcttgttgccaagtgttctgctgttcctggatcagatgcagccagaggagagtttgcaactgacactgatgcacatgatccctttgtcaatgatcttgcctttcaagcaatgttggtctgggtgaggagaacgctgggacaagctgcactcccgaactccattcagaggatagtccaacacagaccggtcccacaagacaaacccttctacatcaccctcagatccaatcagagtggtggacatagccagcacaaacatgcacttcagttccacaacgaacaaggtgatctcttcattgatgttcaagcctctgtcattgcgacagactcacttgcgttctgagtagttagcttaatcacttaggtcaccagtatgaactaaaatgcatgtaggtgtaagagctcatggagagcatggaatattgtatccgaccatgtaacagtataataactgagctccatctcacttcttctatgaataaacaaaggatgttatgatatattaacactctatctatgcaccttattgttctatgataaatttcctcttattattataaatcatctgaatcgtgacggcttatggaatgcttcaaatagtacaaaaacaaatgtgtactataagactttctaaacaattctaactttagcattgtgaacgagacataagtgttaagaagacataacaattataatggaagaagtttgtctccatttatatattatatattacccacttatgtattatattaggatgttaaggagacataacaattataaagagagaagtttgtatccatttatatattatatactacccatttatatattatacttatccacttatttaatgtctttataaggtttgatccatgatatttctaatattttagttgatatgtatatgaaaaggtactatttgaactctcttactctgtataaaggttggatcatccttaaagtgggtctatttaattttattgcttcttacagataaaaaaaaaattatgagttggtttgataaaatattgaaggatttaaaataataataaataataaataacatataatatatgtatataaatttattataatataacatttatctataaaaaagtaaatattgtcataaatctatacaatcgtttagccttgctggaacgaatctcaattatttaaacgagagtaaacatatttgactttttggttatttaacaaattattatttaacactatatgaaattttttttttttatcagcaaagaataaaattaaattaagaaggacaatggtgtcccaatccttatacaaccaacttccacaagaaagtcaagtcagagacaacaaaaaaacaagcaaaggaaattttttaatttgagttgtcttgtttgctgcataatttatgcagtaaaacactacacataacccttttagcagtagagcaatggttgaccgtgtgcttagcttcttttattttatttttttatcagcaaagaataaataaaataaaatgagacacttcagggatgtttcaacccttatacaaaaccccaaaaacaagtttcctagcaccctaccaacgaattcgcggccgcttaattaagatgagtgatactcaggactcaggactcactctgctgatcactagtgctagcctcgaggtcgacacaactttgtatacaaaagttgtctagacctaggctcagcaactcatccagtcaagttcgagtcagtgagttgggcggccgcagcttatagtaaagatttttttgttaataaaatgaaagttaatatttatggatttatttgaacatatttacaagtttttgttaataaatttatttacagaagtgttaaatttgaaaatgtgttaaatgagagttaatatttatggatataatattactttatttaaaaataaaatgaatttatattaaaatatgatttggtaaaagatattataaagaggaacttggatgagaaagacgacgatgggcaaaagttgcatggcacaccgcttttgttcagtaacatctgcactgtggcgcctttttcacactcaccatgcatgctgccacgtcagctttcacactatgacaccactggccatacacgttgccacctcagctttctcctcttctcactatgacacgactggccatgcatgcatgcatgctgccacctcagctcccgcctcttcacccgtgtctttctctcatgtcgcagtgctgcgtgccaacctcttctctctataaatagagagaagagaatgatggttaaactcaaaccaaaacaagaaaacatacacaaatagcaaaacggatccacaaccaaaaatggctgcaaggaacgtgagtgcggctcatgagatgcatgacgagaagaggatagctgttgtgggcatggctgttcagtatgctggatgcaaaacgaaagacgagttctgggaagttctcatgaatggaaaagttgagagcaaagtgatcagcgacaaacgtcttggttcaaattaccgtgctgaacactacaaagctgaaaggagcaagtatgctgacaccttctgcaatgagacatatggaactcttgatgagaacgaaatagacaatgagcatgaactccttttgaaccttgccaaacaagccttggctgaaacatctgtcaaagattcaacaagatgtggcatagtttctggatgcctcagcttcccgatggacaacctccaaggtgaactcttgaatgtgtaccagaaccatgttgagaagaaacttggtgccagagttttcaaagatgcctctcactggtcagaaagagaacagtccaacaaaccagaggctggtgacagaagaatcttcatggaccctgcttcctttgttgctgaggaactcaatcttggcgctctccactactctgttgatgctgcctgtgccactgcgctctatgtgctcagactggcgcaagatcacttggtctctggtgcagctgatgtgatgctttgtggtgcaacatgcctgccggagccgtttttcatactctctgggttctcaaccttccaagccatgcctgttggaacgggtcagaatgtgtccatgccgctgcacaaagattctcaaggattgacccctggtgaaggaggttccatcatggtcctcaaacgtttggatgacgcaatcagagatggagatcacatctatggaacacttttgggagccaatgtcagcaacagtggcactggtctgccacttaaaccccttttgccgtcagagaaaaagtgcctcatggacacctacacacgtatcaatgtgcatccccacaagattcagtatgttgaatgccatgcaactgggactccacaaggtgatcgtgtggaaattgatgctgtgaaggcttgctttgaaggcaaagtcccacgttttggaaccacaaaagggaactttggacacacattggtggcagctgggtttgctggcatgtgcaaagtgcttctctccatgaagcacgggatcattccacccactccgggaatagatgacgaaacgaagatggaccctctggttgtctctggtgaggccattccctggccagaaacgaatggagaaccgaagcgtgctggtctctcagcgtttggatttggtgggaccaatgctcatgctgtctttgaggaacatgacccaagcaatgctgcatgcactggccatgactccatttctgctctctctgcacgttgtggtggtgagtcaaacatgagaatagcaatcactgggatggatgccacttttggtgctttgaaaggattggatgcttttgaaagggccatctacactggtgctcatggtgctataccactcccagaaaagagatggagattcctggggaaagacaaggacttccttgatctttgtggagtcaaagcaacaccgcatggctgttacattgaagatgttgaagttgatttccagaggctgaggactccaatgactcctgaagatatgctcttgcctcaacagcttctggctgtcaccacaattgatagggccatattggactctggcatgaagaaaggtggaaatgtggctgtctttgtggggttggggaccgatcttgaactctaccgtcaccgtgcaagggttgctctcaaggagagagtgaggcctgaagccagcaagaaactcaatgacatgatgcagtacatcaatgattgtgggacaagcacttcttacaccagctacataggcaacttggttgcaacaagggtcagttcacaatggggcttcacgggaccttccttcacaatcacagaaggcaacaattctgtgtacagatgtgctgaacttggcaaatacctcttggaaacgggagaggttgatggggttgtggttgcgggtgttgatctctgtgggagtgctgagaacctttacgtcaagtcaaggcgtttcaaggtgtctacatctgacaccccgagagccagctttgatgcagctgctgatggttactttgttggagagggctgtggtgcatttgtgctcaagcgtgagacaagctgcaccaaggatgacagaatctatgcttgcatggatgccatagttcctggaaatgttccatctgcatgtttgagagaggcattggatcaagccagagtcaagcctggagacatcgagatgttggagctttctgctgattcagcgaggcatttgaaggacccgtctgttctcccaaaggaactcactgctgaggaagagattggcggacttcagacgattcttcgtgacgatgacaagctcccaaggaatgttgcaactggaagtgtcaaggccactgttggtgacactggttatgcttctggtgctgccagtttgattaaggctgcgctttgcatctacaaccgttacctgcccagcaatggagatgactgggatgaacctgcacctgaagcaccctgggacagcacactctttgcgtgccagacctcaagagcttggttgaagaaccctggtgagagacgttatgcggctgtttccggagtcagtgaaaccagaagttgctacagtgtgctgctttctgaagcagagggacactacgagagagagaacagaatcagtttggatgaggaagcacccaagctcattgtgttgagagcagactcccatgaagagattcttggaagattggacaagataagggaaaggttcttgcagcccacgggtgctgcacccagagagtctgaattgaaggcgcaagcccgtaggatctttcttgaactccttggtgagacccttgcccaagatgcagcttcatctggaagtcagaagccccttgctctcagcttggtctccactccatccaagctccagagagaggtggaacttgcggcaaaaggcattccgagatgtctcaagatgagacgtgattggagttcccctgctggaagcagatatgcgcctgagcctttggccagtgacagagttgccttcatgtatggagaaggaaggagcccttactatggcatcacacaagacattcataggatttggcctgaacttcatgaggtcatcaatgagaaaacaaaccgtctctgggctgaaggtgacagatgggtcatgccaagggccagcttcaagagtgagcttgagtcacaacagcaagagtttgacagaaacatgattgaaatgttccgtcttggaatcctcacctcaattgccttcacaaacctggcgagagatgttctcaacatcacgcccaaagcagcctttggactcagtttgggagagatttccatgatctttgctttctccaagaaaaacggtttgataagcgatcagttgacaaaggatttgagagagtcagatgtctggaacaaagctctggctgttgagttcaatgcgctcagagaagcctggggcattccacagtctgtcccaaaagatgagttctggcaaggttacatagtgaggggaacgaaacaagacatagaagcagccatagcaccagactcaaagtatgtgaggttgaccatcatcaatgatgccaacactgctctcatcagtggaaagcctgatgcatgcaaagctgcgattgctcgtcttggtggcaacatccctgcgcttccagtcactcaaggcatgtgtgggcattgcccagaggtgggaccttacaccaaggacatcgcaaagatccacgccaaccttgagttccctgtggttgatggtcttgatctctggactaccataaaccagaagaggcttgtgccaagagccacgggtgccaaagatgaatgggctccttcatcctttggggagtatgctggacagctctatgagaaacaagccaacttccctcagatagttgaaaccatctacaagcagaactatgatgtgtttgttgaagttgggccaaacaatcacagaagcacagcagtgagaaccacgcttggaccacagagaaaccaccttgctggtgccatagacaagcagaacgaggatgcttggacgacaatagtcaagctcgtggcttcattgaaggctcaccttgttcctggagtgaccatcagtccgctctaccactccaagctcgttgcagaggctgaggcttgttatgctgcgctctgtaaaggtgagaaacccaagaaaaacaagtttgtgagaaagattcagttgaatggcagattcaacagcaaggcagaccccatctcctcagcagaccttgcatccttcccacctgcggaccctgcgattgaagctgccatctcttcaaggatcatgaagcctgtggctccgaaattctatgcgcgtctcaacattgatgagcaagatgagaccagagatccgatcttgaacaaggacaatgcgccttccagctccagctcttccagcagttcctcttccagcagttcatctccgtctcctgctccttcagctccagttcagaagaaagctgccccagctgcggagacaaaagctgttgccagtgctgatgcacttcgtagtgccctgcttgatcttgactccatgcttgcgctcagctctgcaagtgcttctggcaaccttgttgagactgcgccatctgatgccagtgtcattgtccctccgtgcaacattgctgatcttggcagcagagctttcatgaaaacttatggtgtttctgcgcctctgtacaccggtgcaatggccaagggaattgcctctgcggacttggtgatcgcagctggaaggcaaggaatccttgcgtcatttggtgctggaggccttccaatgcaagttgtgcgtgagtccattgaaaagattcaagctgccctgcccaatggaccatatgctgtcaacctcatccattctccttttgacagcaaccttgagaagggaaatgttgatctcttcttggaaaagggtgtcacttttgttgaggcttcagccttcatgacgttgacaccgcaagttgtcagatacagagcggctgggttgacgaggaatgcagatgggtcagtcaacataaggaacagaatcattgggaaagtctccagaactgagctggctgaaatgttcatgcgtcctgcacctgagcatcttttgcagaagctcattgcttctggggagatcaatcaagaacaagctgagttggccagacgtgttcctgtggctgatgacattgcggttgaagctgattctggtggacacactgacaaccgtccaatccatgtcattctgcctctgattatcaacctgagggataggcttcacagagagtgtggatacccagcaaacctgagggttcgtgttggtgctgggggtggcattgggtgtccccaagctgcgctggcaactttcaacatgggtgcctctttcattgtcactggaacagtgaaccaagttgccaaacaatctgggacgtgtgacaatgtgaggaaacagcttgcgaaagcaacttactcagatgtttgcatggcaccggcagctgacatgtttgaggaaggtgtgaaacttcaagttttgaagaaaggaacaatgttcccttcaagagccaacaaactctatgagttgttctgcaagtatgattcttttgagtccatgcctccagcagagcttgcgagggttgagaaaagaatcttcagtcgtgcattggaagaggtctgggatgagaccaagaacttctacatcaaccgtctccacaacccagagaagatacagagggctgagagggaccccaaactgaagatgtcactgtgtttcagatggtatctgtccctggcttcaaggtgggccaacactggagcttctgacagagtcatggactaccaagtttggtgtggtcctgccattggttcattcaatgatttcatcaaaggaacttaccttgatccggcagtggcaaatgagtacccgtgtgttgtgcagatcaacaaacagattcttagaggagcgtgcttcttgaggcgtcttgaaatactgagaaatgcaaggctttcagatggtgcagctgcacttgtggcgagcattgatgacacatatgtccctgctgagaagctgtgagtagttagcttaatcacttaggtcacccagtccaagcccggcctagcacgatgatcatgagtgttgctattgatgtatgttaatactatacacagtcatcgtgtgtgttttataaaactgtaagcttaggatgtttgaggctaatgtaattagcactacaccgtaataaatgagaggtttactttatgttttaataatgttcttacccttgctgctctctaaactgtaatggcgtacggttagctaaactaaagtaaaaatcgattcgcttgagtaaaattagtgaccgggaaagatcatcgactactactgctcagagatgtaatcggtaattaagacttcaagctcaataattaattaggagtaaatctggcttcgaatttttaaattgtcaacttccaaagaaggattggcaagactcaatctcaattgcccaacaaacatatggctctttacaaatttggaatctctttttgatggcaagaacgtcgtaattcctctgtcgatctcatgtaattaccaaactcatctacttattactttctttatatgcacttactgatgcggccgcttaattaatctgacctgaccactagacctgagtgagtacagatgtgctactagtgctagcctcgaggtcgaccaacttttctatacaaagttgtctagacctaggactaggcactgagtgactcactgacctgactgagtgactggcggccgcagcttatagtaaagatttttttgttaataaaatgaaagttaatatttatggatttatttgaacatatttacaagtttttgttaataaatttatttacagaagtgttaaatttgaaaatgtgttaaatgagagttaatatttatggatataatattactttatttaaaaataaaatgaatttatattaaaatatgatttggtaaaagatattataaagaggaacttggatgagaaagacgacgatgggcaaaagttgcatggcacaccgcttttgttcagtaacatctgcactgtggcgcctttttcacactcaccatgcatgctgccacgtcagctttcacactatgacaccactggccatacacgttgccacctcagctttctcctcttctcactatgacacgactggccatgcatgcatgcatgctgccacctcagctcccgcctcttcacccgtgtctttctctcatgtcgcagtgctgcgtgccaacctcttctctctataaatagagagaagagaatgatggttaaactcaaaccaaaacaagaaaacatacacaaatagcaaaacggatccacaaccaaaaatggcgcttcgtgtcaagaccaacaagaagccatgttgggagatgaccaaggaggaactgacctctggcaaaactgaggtgttcaactatgaggaactcctggagtttgcagagggtgacatagctaaggtttttggtccggagtttgctgtcatagacaagtaccccagaagggtgaggctgcctgctcgtgaatacctgcttgtgacaagggtcacactcatggatgccgaggtcaacaactacagagttggtgccagaatggtcactgagtatgatcttccagtgaatggcgaattgtctgagggaggtgattgtccctgggcagttctggttgagagtggacagtgcgatttgatgctgatatcatacatgggaattgatttccagaaccaaggtgacagagtttaccgtctgctcaacaccacgttgacattctatggggttgcccatgagggagagacccttgagtatgacatcagagtgaccggttttgccaaacgtttggatggtggcatctccatgttcttctttgagtatgactgctatgtcaatgggaggcttctcattgagatgagagatggctgtgctggcttcttcacaaatgaggagcttgatgcgggaaagggtgtggtgttcacaagaggggatttggctgccagagctaagattccaaagcaagatgtttctccctatgctgtcgctccctgccttcacaaaacaaaactcaacgaaaaggagatgcagaccttggttgacaaagattgggcttccgtttttggctcaaagaatggcatgccggagatcaactacaaactctgcgcacgtaagatgctcatgattgatagagtcaccagcattgaccataagggaggtgtgtacggtttgggtcagttggttggtgagaaaatcttggagagggaccattggtacttcccatgccattttgttaaggatcaagtcatggctggatctcttgtcagcgacggttgttcacaaatgctcaagatgtacatgatctggctcggtttgcaccttaccaccggaccatttgacttcagacccgtcaacggacacccgaacaaagttaggtgtaggggtcagatatctcctcataagggaaagttggtctacgtcatggagatcaaagagatgggattcgacgaggataacgatccgtacgccattgctgacgtcaacatcattgacgttgatttcgaaaagggtcaagatttcagccttgatagaatcagcgactacggaaagggggatcttaacaaaaagatcgtcgtggacttcaagggcattgctctcaagatgcagaagagatccacgaacaagaacccctccaaagttcagcccgtttttgctaacggtgcagccactgtgggaccggaagcgtccaaggccagctctggtgccagtgctagtgcttctgctgcccctgcgaagcctgctttctcagcagatgttcttgcgccaaagccagttgcacttcctgaacatatcctcaagggtgacgctctcgctccgaaagaaatgtcctggcatcccatgtcaaaacttcctggcaacccgacgccgttcttctcccctagttcttaccctccgagggcaatttgcttcatccctttccctggcaacccacttgacaacaattgcaaagctggagaaatgcctctgaactggtacaacatgtcagagttcatgtgtggaaaagttagcaactgcttgggaccagagttcgcaagatttgataagtcaaatacgagcagaagccctgcttttgatttggctcttgtgactagagttgttgaagtcacaaacatggaacatggcaagttcctgaatgttgattgcaatcccagcaaaggcacaatggtgggggagtttgactgtcctcaagatgcgtggttctttgatggttcttgcaatgatgggcacatgccttattccatcatcatggaaatcggacttcagacatccggtgttctcaccagtgtgttgaaagcaccactgacgatggacaaagatgacattctctttaggaaccttgatgcaagtgctgaaatggtgaggccagatgtggatgtgagggggaaaaccataaggaatgtgaccaagtgcactggatatgcaatgttgggaaagatggggattcacagattcacgtttgagttgtctgttgatggcgtggttttctacaaaggaagcacttcctttggatggttcactccagaggtgtttgctcagcaagctggacttgacaatgggaaaaagacggagccttggtgcaaaactaacaacacgagtgtgagaagagttgaaatcgcatcagccaaaggcaaagaacagctgactgagaaacttccagatgcaactaatgctcaagttctcagaaggtcagaacagtgtgagtatttggattacctcaacattgctcctgattctgggctgcatgggaaaggatatgcgcatggacacaaagatgttaacccacaagactggttcttctcttgtcacttttggtttgatcctgtgatgcctggatctttgggaattgagtcaatgttccagctcattgaggcatttgcggtggaccagaacataccgggagaatacaatgtgagcaatccgacctttgcccatgcccctggaaaaacggcgtggaagtaccgtggtcaattgacaccaaagaaccgtgcgatggactgtgaggtgcacatagtttcaatcacagcctctcctgaaaatggaggctacgttgacatagtggcagatggagcactttgggttgatggtctccgtgtgtatgaagccaaagaactcagagttcgtgttgtcagtgcaaaacctcaagccattccggatgttcaacaacagccacccagcgcaaaagcggaccctgggaaaactggagttgcactcagtccgactcagttgagagatgtcctgcttgaagtggacaatccattgtatcttggtgttgaaaactccaatttggtgcagtttgaatccaaacctgcaacttcttcaaggattgtcagtatcaaaccatgctccataagtgatcttggtgacaagtccttcatggaaacgtacaatgtgtcagcacctctgtacactggagcaatggccaagggaattgcgtctgcggaccttgtcattgctgctgggaagaggaagatattgggttcttttggagcgggtgggcttccaatgcaccatgtgagggcagctttggagaagatacaagcggctctgcctcaaggaccatatgctgtgaacctcattcattcaccttttgacagcaacttggaaaaggggaatgttgatctcttcctcgaaaagggcgttactgtggtggaggcttctgcattcatgaccctcactccccaagttgttcgttaccgtgcagccggactctcaaggaacgctgatgggagtgtcaacatcagaaaccgtatcattggaaaagtgtccagaacagaactcgccgaaatgttcatcagaccggctccggaacacctccttgagaaactcatagcttctggtgagataacacaagaacaagccgaacttgcccgtcgtgttcctgtcgcagacgacatcgctgttgaagctgattctggtggtcacactgacaaccgtcccatccacgtcatcttgcctttgatcatcaaccttaggaacagactgcacagagagtgtggttatcctgcgcaccttagagtcagagttggagctggaggcggtgttggctgcccacaagctgctgcggctgccctcacaatgggagctgccttcatagtgactgggactgtcaatcaagttgctaaacagtccgggacatgtgacaacgtgagaaaacaactcagtcaagccacctacagtgacatttgcatggctccagcagctgatatgtttgaggaaggtgtgaaactccaagttctcaagaagggaacaatgttcccatcaagagctaacaaattgtacgaactcttttgcaagtacgactctttcgattcaatgcctcctgctgaacttgaaaggatcgagaagaggatcttcaagagggcacttcaagaggtctgggaagagaccaaggacttttacatcaatggtttgaagaatccagagaagatacagagagcggaacatgaccccaaactcaagatgtctttgtgtttcagatggtatcttggtcttgcatcacgttgggccaacatgggtgctcctgatcgtgtcatggactatcaagtctggtgtggtccagccattggagccttcaatgacttcatcaaaggaacatatcttgatcctgctgtctctaatgagtacccatgtgttgtccagatcaaccttcagattttgcgtggtgcatgttacctgaggcgtcttaatgctctgagaaatgatccgaggattgatcttgagactgaagatgctgcctttgtctatgagccaacgaatgcgctttgagtagttagcttaatcacttaggtcacccagtccaagcccggcctagcacgatgatcatgagtgttgctattgatgtatgttaatactatacacagtcatcgtgtgtgttttataaaactgtaagcttaggatgtttgaggctaatgtaattagcactacaccgtaataaatgagaggtttactttatgttttaataatgttcttacccttgctgctctctaaactgtaatggcgtacggttagctaaactaaagtaaaaatcgattcgcttgagtaaaattagtgaccgggaaagatcatcgactactactgctcagagatgtaatcggtaattaagacttcaagctcaataattaattaggagtaaatctggcttcgaatttttaaattgtcaacttccaaagaaggattggcaagactcaatctcaattgcccaacaaacatatggctctttacaaatttggaatctctttttgatggcaagaacgtcgtaattcctctgtcgatctcatgtaattaccaaactcatctacttattactttctttatatgcacttactgatgcggccgcttaattaatcacgagtggatgactgtcacgactgactcatgactgactactagtgctagcctcgaggtcgacacaactttgtataataaagttgtctagacctaggagctgtgctgggtaactcacatgagtcactggtcacatcagcggccgcagcttatagtaaagatttttttgttaataaaatgaaagttaatatttatggatttatttgaacatatttacaagtttttgttaataaatttatttacagaagtgttaaatttgaaaatgtgttaaatgagagttaatatttatggatataatattactttatttaaaaataaaatgaatttatattaaaatatgatttggtaaaagatattataaagaggaacttggatgagaaagacgacgatgggcaaaagttgcatggcacaccgcttttgttcagtaacatctgcactgtggcgcctttttcacactcaccatgcatgctgccacgtcagctttcacactatgacaccactggccatacacgttgccacctcagctttctcctcttctcactatgacacgactggccatgcatgcatgcatgctgccacctcagctcccgcctcttcacccgtgtctttctctcatgtcgcagtgctgcgtgccaacctcttctctctataaatagagagaagagaatgatggttaaactcaaaccaaaacaagaaaacatacacaaatagcaaaacggatccacaaccaaaaatgcttcagcacacttggcttccgaagcctcccaatctgaccctcttgtcagatgaggttcatctctggaggattcctcttgaccagcctgagtcacaacttcaagaccttgctgccaccctgagcagtgatgaattggcgagggcaaacagattctactttccagaacacagaaggcgtttcactgctgggagaggcatcctcagatccatcttgggtggatacttgggagtggaaccgggtcaagtcaagtttgattatgagtcccgtgggaaaccgatccttggtgacagatttgctgagagtggactcctgttcaacttgtctcacagccagaaccttgccttgtgtgctgtcaactacacgcgtcaaataggcattgatcttgaatatctgcgtccaacatctgacttggagtctcttgcaaagaggttctttctcccaagagaatatgaactcttgaggtcactccctgatgagcagaaacagaagattttctttcgttactggacttgcaaagaggcttatctcaaagcaacgggagatggaatagccaaacttgaagagatcgagatagcactcaccccaacagaacctgccaagctccaaacagctcctgcgtggtctctgttggagcttgtgccagatgacaattgtgttgcagctgtggctgttgcgggttttggttggcagcccaagttctggcattactgagtagttagcttaatcacttaggtcacccagtccaagcccggcctagcacgatgatcatgagtgttgctattgatgtatgttaatactatacacagtcatcgtgtgtgttttataaaactgtaagcttaggatgtttgaggctaatgtaattagcactacaccgtaataaatgagaggtttactttatgttttaataatgttcttacccttgctgctctctaaactgtaatggcgtacggttagctaaactaaagtaaaaatcgattcgcttgagtaaaattagtgaccgggaaagatcatcgactactactgctcagagatgtaatcggtaattaagacttcaagctcaataattaattaggagtaaatctggcttcgaatttttaaattgtcaacttccaaagaaggattggcaagactcaatctcaattgcccaacaaacatatggctctttacaaatttggaatctctttttgatggcaagaacgtcgtaattcctctgtcgatctcatgtaattaccaaactcatctacttattactttctttatatgcacttactgatgcggccgcttaattaactactgtcactgaggccgtagacgagtacggactgatctaactagtgctagcctcgaggtcgacacccagcttt

SEQ ID NO: 54 - DNA, 42674 bp, Artificial sequence
  plasmid pDAB9344
gtacaaaaaagcaggcttctagacctaggtggagtcatcacgcagactatctcagcatgtgcgtagcacgcggccgcctcccagtatcattatagtgaaagttttggctctctcgccggtggttttttacctctatttaaaggggttttccacctaaaaattctggtatcattctcactttacttgttactttaatttctcataatctttggttgaaattatcacgcttccgcacacgatatccctacaaatttattatttgttaaacattttcaaaccgcataaaattttatgaagtcccgtctatctttaatgtagtctaacattttcatattgaaatatataatttacttaattttagcgttggtagaaagcataatgatttattcttattcttcttcatataaatgtttaatatacaatataaacaaattctttaccttaagaaggatttcccattttatattttaaaaatatatttatcaaatatttttcaaccacgtaaatctcataataataagttgtttcaaaagtaataaaatttaactccataatttttttattcgactgatcttaaagcaacacccagtgacacaactagccatttttttctttgaataaaaaaatccaattatcattgtattttttttatacaatgaaaatttcaccaaacaatgatttgtggtatttctgaagcaagtcatgttatgcaaaattctataattcccatttgacactacggaagtaactgaagatctgcttttacatgcgagacacatcttctaaagtaattttaataatagttactatattcaagatttcatatatcaaatactcaatattacttctaaaaaattaattagatataattaaaatattacttttttaattttaagtttaattgttgaatttgtgactattgatttattattctactatgtttaaattgttttatagatagtttaaagtaaatataagtaatgtagtagagtgttagagtgttaccctaaaccataaactataagatttatggtggactaattttcatatatttcttattgcttttaccttttcttggtatgtaagtccgtaactggaattactgtgggttgccatgacactctgtggtcttttggttcatgcatggatcttgcgcaagaaaaagacaaagaacaaagaaaaaagacaaaacagagagacaaaacgcaatcacacaaccaactcaaattagtcactggctgatcaagatcgccgcgtccatgtatgtctaaatgccatgcaaagcaacacgtgcttaacatgcactttaaatggctcacccatctcaacccacacacaaacacattgcctttttcttcatcatcaccacaaccacctgtatatattcattctcttccgccacctcaatttcttcacttcaacacacgtcaacctgcatatgcgtgtcatcccatgcccaaatctccatgcatgttccaaccaccttctctcttatataatacctataaatacctctaatatcactcacttctttcatcatccatccatccagagtactactactctactactataataccccaacccaactcatattcaatactactctaggatccacaaccaaaaatggcttcctctatgctctcttccgctactatggttgcctctccggctcaggccactatggtcgctcctttcaacggacttaagtcctccgctgccttcccagccacccgcaaggctaacaacgacattacttccatcacaagcaacggcggaagagttaactgcatgcaggtgtggcctccgattggaaagaagaagtttgagactctctcttaccttcctgaccttaccgattccgaagcagcgaggctgcaagagcagaaaggaggtgagatggacacgaggattgcgatcataggcatgagcgccatacttccttgtggaaccacggtgagagagtcatgggagaccataagggctggcattgattgcctgtctgatcttcctgaggatcgtgttgatgtgactgcgtactttgacccagtcaagaccacaaaggacaaaatctactgcaagagaggaggtttcattcctgagtatgactttgatgcgcgtgagtttggtctcaacatgttccagatggaagattctgatgcgaatcagaccatctcacttctcaaggtcaaagaagcacttcaagatgctgggattgatgcacttggaaaggagaagaaaaacataggatgcgtgcttggcattggaggtggacagaagagttcacatgagttctacagcagactcaactatgtggttgtggagaaagtcttgagaaagatggggatgccagaggaagatgtcaaagtggctgtggagaagtacaaagcgaacttcccagaatggagacttgactctttccctggattccttgggaatgtcactgctggcagatgcaccaacacattcaacttggatggcatgaactgcgttgtggatgctgcatgtgcaagctccttgatagcagtcaaggttgcgattgatgaactgctctatggtgactgcgacatgatggtcactggtgcaacctgcacagacaactccattgggatgtacatggctttctcaaagacacctgtgttcagcacggacccaagtgtgagagcgtatgatgagaaaacgaaagggatgctcattggtgagggatcagccatgttggtgctcaaacgttatgcagatgcagtgagggatggtgatgagattcatgctgtgattcgtggttgtgcaagctcaagtgatggcaaagcagctggcatctacactcccacaatcagtggtcaagaggaagccttgagacgtgcatacaatcgtgcctgcgttgaccctgccactgtcactttggttgagggtcatgggactggcactccagttggagataggattgagttgactgcgttgaggaacttgtttgacaaagcgtatggtgaagggaacacagagaaagttgcagttggaagtatcaagtccagtattggtcatttgaaggctgttgctggtcttgctggaatgatcaaggtcatcatggctctcaaacacaagactttgcctggaacgatcaatgtggacaatccacccaatctctatgacaacactcccatcaatgagtcatccctctacatcaacacgatgaacagaccctggttccctccacctggtgttccgagacgtgctggaatatccagctttggctttggaggtgccaactaccatgcagtgttggaagaggctgaaccagagcacacgacagcgtacagactcaacaaacgtccacaaccggtgttgatgatggctgcaactcctgctgcgttgcagagcctttgtgaagctcagctgaaagagtttgaagctgcgatcaaggagaatgagacagtcaagaatactgcctacatcaagtgtgtcaagtttggagaacagttcaagttccctgggagcatacctgcgaccaatgcgagactgggattcttggtcaaagatgcggaggatgcgtgctccacgcttcgtgctatatgtgctcagtttgccaaagatgtgaccaaagaagcgtggaggcttccgagagaaggagtttctttccgtgccaaaggcattgccaccaatggtgctgttgctgcactcttctctggacaaggtgctcagtacacacacatgttcagtgaagttgcgatgaactggcctcagttcagacagtccattgctgcaatggacgctgcacagtccaaggttgctggaagtgacaaagactttgaaagagtctctcaagtcctgtacccaaggaaaccgtacgaacgtgagccagaacaagatcacaagaaaatctcactcacagcatacagccagccgtcaaccctggcatgtgctcttggtgcctttgagattttcaaggaagctggattcactccagactttgcagctggacacagcttgggtgagtttgctgcgctctatgcagctggttgtgttgacagagatgagttgtttgaacttgtttgcagaagggcaaggatcatgggaggcaaagatgcacctgccacacccaaaggttgcatggcagctgtcataggacccaacgcagagaacatcaaggttcaagctgccaacgtctggcttggaaactcaaactctccgtctcagactgtcattactgggtctgttgaagggattcaagctgaaagtgccagattgcagaaggaagggttcagagttgtgcctcttgcttgtgagtctgccttccattctccacagatggaaaatgccagctcagctttcaaagatgtcatatccaaggtttccttccgtacacccaaagcagaaacaaagctcttcagcaatgtttctggagagacctatccgacggatgccagagagatgctcactcaacacatgacctcatctgtgaagttcctgacccaagtgaggaacatgcaccaagctggtgcgagaatctttgttgagtttggaccgaaacaagttctcagcaaacttgtttctgaaaccctcaaagatgacccgtctgttgtcacagtgtctgtgaacccagcttctggcacggactctgacatacagttgagggatgctgcagttcagctggttgtggctggtgtcaatcttcaagggtttgacaagtgggatgctcctgatgccacgaggatgcaagccatcaagaaaaagagaaccacactcagactttcagctgccacctatgtcagtgacaagaccaagaaagtgagggatgctgccatgaacgacggaagatgtgtcacatacctcaagggtgctgcaccactcatcaaggctcctgaacctgtggttgacgaagctgccaagagggaggctgaaaggcttcagaaggagcttcaagacgctcagaggcagcttgacgacgccaaacgtgcagctgcagaagccaactccaaacttgctgctgccaaggaggaagccaagactgctgcagcttcagccaagcctgcagttgacactgctgttgtggagaaacatcgtgccatcctcaagtccatgctggctgagctggatggttatggaagtgttgatgcttcttcccttcagcaacagcaacagcaacagactgctccggcgcctgttaaagccgctgcccctgccgctcccgttgcaagtgctcctgctcccgccgtgtccaacgagttgcttgagaaagctgagacagttgtgatggaggttctcgctgccaagactggatacgaaacagacatgattgaggcggacatggagcttgagactgagttgggaattgacagcatcaagagggttgaaattctttctgaagtccaagctatgcttaacgttgaggcgaaagatgttgatgctctctctaggacgagaacagtgggtgaagttgtcaacgctatgaaggcagaaatcgctggttcttccgctccggcgccggcagctgccgcacctgcaccggctaaagcggctccagctgcagctgcaccagctgtttctaatgagctgctcgaaaaggcagaaactgttgtgatggaagtccttgctgccaaaactggctacgaaactgacatgatagaatcagacatggagcttgagacggagcttggaattgattccatcaagcgtgtggaaatcctcagtgaagtccaagccatgctcaatgtggaagctaaggatgtggatgctctctcaaggaccagaactgtcggtgaggttgtcaatgccatgaaggctgagatagctggaggctccgctcctgcgccggccgctgccgctcctggtcccgctgccgcggctccagctccagctgcagccgctccggccgtctcaaacgaactccttgaaaaagctgagaccgtcgtgatggaggtcttggcagctaaaaccggctatgagactgacatgattgagtctgacatggaattggagacagaacttgggatagacagcatcaaacgtgttgaaatcctcagtgaggtccaagctatgctgaacgtggaagcgaaggatgttgatgctctgtccagaacgaggaccgttggtgaggttgtggatgccatgaaggctgaaattgctggagggtctgcgcccgcgccagctgcagccgctcctgcacccgcagccgcggcacctgctccagctgcacctgcacctgccgtttcttcagaactcttggagaaggctgagacggttgtgatggaggttttggctgcaaagactggctatgagaccgacatgattgaatctgatatggaattggagacagagcttgggatcgattccatcaaaagagtggagatcctgagtgaagtccaagccatgctcaatgttgaagctaaggatgttgatgcactttcaagaacaaggacagtgggtgaggttgtggatgccatgaaggcggagattgctggagggagcgcgcctgcgccagctgccgcggcacctgcaccggcagccgcagctccagctccagctgcaccagcaccggccgcgcccgcgccagctgtttcatccgaactcctggaaaaggccgagacggttgtgatggaggtgctcgcagctaagactggttacgagaccgacatgattgaaagtgacatggagcttgaaaccgagttgggaatagatagcatcaaacgtgttgaaatcttgtctgaggtccaagctatgttgaacgtggaggcaaaagatgtcgatgcgctttcaagaaccagaacagtcggtgaggtcgtggacgccatgaaggctgaaattgccggaagctctgctagtgcgccagctgcagccgcacctgcacctgctgccgcggcacctgctccagctgcagccgctcctgccgtcagcaatgagttgctggagaaagccgaaacagttgtgatggaagtccttgctgcaaaaactggttacgaaacggacatgattgagtcagacatggaattggagaccgaacttggaatagattccatcaagagagtggagatcctctctgaggtgcaagccatgctcaacgttgaggctaaagatgttgatgcactcagtaggacaagaactgtgggggaagttgtcgatgcgatgaaggctgagattgctggaggctctgctcctgcgccggcagctgccgcacctgcacccgcagccgcggcaccagctgtcagcaacgaattgcttgagaaggctgaaacagttgtcatggaagtgctggctgcaaaaaccggctatgagactgacatgattgagtctgacatggaacttgagacggaattgggcattgacagcatcaagcgtgttgagatcctcagtgaagtccaagcaatgctcaatgtggaggctaaggatgtggatgccctctcaaggaccagaacagttggtgaggtcgttgatgcgatgaaggcggagatcgctggaagttccgcgcctgcgccagctgcagccgctcctgcacccgcagccgcggcaccggctccagctgcagccgcaccggccgtctcctcagaactcctggaaaaggctgagacagttgtgatggaagtccttgctgcgaaaactggctatgagaccgacatgattgaatctgacatggaactggagaccgagcttggaattgactccatcaaacgtgttgaaatcctctctgaggttcaagcgatgttgaatgtggaggccaaagatgttgatgctctttccagaacaaggacggtgggagaggtggttgatgccatgaaggctgagatagctgggggttctgctcctgcgccagctgcagccgctcctgctcccgctgccgcggcaccagctgtcagcaacgaactccttgaaaaagctgaaactgttgtgatggaggttttggctgcaaagactggatacgagactgacatgatagagtcagacatggagttggaaacagagcttgggattgatagcatcaagcgtgtggaaatcctttctgaggttcaagccatgctgaacgttgaggccaaagatgtcgatgctttgtcaaggaccagaacggttggagaagtggtcgatgccatgaaggctgagatagctggtggatcagcccctgctccggctgcagccgctcctgcaagtgccggtgctgcaccagctgtgaagattgattcagttcatggtgctgactgtgacgatttgtcactgatgcacgcaaaggtggttgacatcagaaggccagatgaactgattctggaaagaccggagaaccgtccagttcttgtcgttgacgatggctcagagttgacacttgctcttgtgagggtgttgggagcctgtgcagttgtcttgacctttgagggattgcagttggctcagagagctggtgcagctgccattcgtcatgttctggctaaggacctttcagcagaatcagctgagaaggccatcaaagaggctgagcaaagatttggagcgttgggaggcttcataagccagcaagcagaaaggtttgaaccagctgagatactgggtttcacactcatgtgtgcgaagtttgccaaagcctctctctgcactgctgtggctggaggtcgtcctgccttcatcggtgtggctaggcttgacggcagacttggattcacctctcaaggcacttctgacgcactcaagagagcacagcgtggagcgatctttggactctgcaagacaatagggttggagtggtcagaatctgatgtgttcagccgtggtgtggacattgctcaagggatgcacccagaagatgctgcagttgccatagttagggagatggcgtgtgctgacatcagaatcagagaggttgggattggagcaaaccagcaaagatgcacaatcagagctgccaagttggagactgggaaccctcagagacagatagcgaaagacgatgtgcttctggtttctggaggtgctcgtgggatcacacctctttgcatccgtgagatcacgcgtcagattgctggaggcaagtacattctgttgggtcgtagcaaagtttctgcgtctgaaccagcatggtgtgctggcatcactgatgagaaggctgtgcagaaagctgccacccaagagttgaagagggccttcagtgctggtgaaggacccaaacccactccaagggctgtcacgaaacttgtgggatctgttcttggtgctcgtgaagtgagaagctccattgctgccattgaagctctgggtggcaaagcgatctacagctcttgtgatgtgaactctgctgcagatgttgccaaagcagttagggatgcagagtcccagcttggtgccagagttagtggaatcgttcacgcttctggtgtgctccgtgatcgtctcatagagaagaaactccctgacgagtttgatgctgtctttgggaccaaagtcactgggttggagaatcttctggctgcagttgatcgtgccaacctcaaacacatggttctcttcagctcccttgctggtttccacggcaatgttggtcagtctgactatgcgatggcaaacgaagctctcaacaagatgggtttggaacttgcgaaggatgtcagtgtcaagtccatctgctttggtccctgggatggtgggatggtgacacctcaactcaagaaacagtttcaagaaatgggagttcagatcattcctcgtgaaggaggtgctgatacagttgcgaggattgtgttgggatcaagtcctgctgagatccttgttggaaactggaggacaccatccaagaaagttggaagtgacacgatcaccctgcatagaaagatcagtgccaagtccaatcccttcttggaggatcatgtcatacaaggcagaagggtgttgccaatgacccttgctattgggagccttgctgagacctgccttggactcttccctggctactctctctgggccatagatgacgcacagctcttcaaaggtgtcactgttgatggagacgtcaactgtgaagtgaccctcacaccgtccactgctccgagtgggagggtgaatgtccaagcgacgctcaagacgttctcaagtggaaaacttgttccagcctacagagctgtcatagtgttgtccaaccaaggtgctccacctgccaatgcaaccatgcagcctccgagccttgatgcagatcctgctttgcaagggtcagtctatgatggcaagactctctttcatggtcctgcgttcagaggcattgatgacgttctcagctgcaccaagagccagcttgttgccaagtgttctgctgttcctggatcagatgcagccagaggagagtttgcaactgacactgatgcacatgatccctttgtcaatgatcttgcctttcaagcaatgttggtctgggtgaggagaacgctgggacaagctgcactcccgaactccattcagaggatagtccaacacagaccggtcccacaagacaaacccttctacatcaccctcagatccaatcagagtggtggacatagccagcacaaacatgcacttcagttccacaacgaacaaggtgatctcttcattgatgttcaagcctctgtcattgcgacagactcacttgcgttctgagtagttagcttaatcacttaggtcaccagtatgaactaaaatgcatgtaggtgtaagagctcatggagagcatggaatattgtatccgaccatgtaacagtataataactgagctccatctcacttcttctatgaataaacaaaggatgttatgatatattaacactctatctatgcaccttattgttctatgataaatttcctcttattattataaatcatctgaatcgtgacggcttatggaatgcttcaaatagtacaaaaacaaatgtgtactataagactttctaaacaattctaactttagcattgtgaacgagacataagtgttaagaagacataacaattataatggaagaagtttgtctccatttatatattatatattacccacttatgtattatattaggatgttaaggagacataacaattataaagagagaagtttgtatccatttatatattatatactacccatttatatattatacttatccacttatttaatgtctttataaggtttgatccatgatatttctaatattttagttgatatgtatatgaaaaggtactatttgaactctcttactctgtataaaggttggatcatccttaaagtgggtctatttaattttattgcttcttacagataaaaaaaaaattatgagttggtttgataaaatattgaaggatttaaaataataataaataataaataacatataatatatgtatataaatttattataatataacatttatctataaaaaagtaaatattgtcataaatctatacaatcgtttagccttgctggaacgaatctcaattatttaaacgagagtaaacatatttgactttttggttatttaacaaattattatttaacactatatgaaattttttttttttatcagcaaagaataaaattaaattaagaaggacaatggtgtcccaatccttatacaaccaacttccacaagaaagtcaagtcagagacaacaaaaaaacaagcaaaggaaattttttaatttgagttgtcttgtttgctgcataatttatgcagtaaaacactacacataacccttttagcagtagagcaatggttgaccgtgtgcttagcttcttttattttatttttttatcagcaaagaataaataaaataaaatgagacacttcagggatgtttcaacccttatacaaaaccccaaaaacaagtttcctagcaccctaccaacgaattcgcggccgcttaattaagatgagtgatactcaggactcaggactcactctgctgatcactagtgctagcctcgaggtcgacacaactttgtatacaaaagttgtctagacctaggctcagcaactcatccagtcaagttcgagtcagtgagttgggcggccgcctcccagtatcattatagtgaaagttttggctctctcgccggtggttttttacctctatttaaaggggttttccacctaaaaattctggtatcattctcactttacttgttactttaatttctcataatctttggttgaaattatcacgcttccgcacacgatatccctacaaatttattatttgttaaacattttcaaaccgcataaaattttatgaagtcccgtctatctttaatgtagtctaacattttcatattgaaatatataatttacttaattttagcgttggtagaaagcataatgatttattcttattcttcttcatataaatgtttaatatacaatataaacaaattctttaccttaagaaggatttcccattttatattttaaaaatatatttatcaaatatttttcaaccacgtaaatctcataataataagttgtttcaaaagtaataaaatttaactccataatttttttattcgactgatcttaaagcaacacccagtgacacaactagccatttttttctttgaataaaaaaatccaattatcattgtattttttttatacaatgaaaatttcaccaaacaatgatttgtggtatttctgaagcaagtcatgttatgcaaaattctataattcccatttgacactacggaagtaactgaagatctgcttttacatgcgagacacatcttctaaagtaattttaataatagttactatattcaagatttcatatatcaaatactcaatattacttctaaaaaattaattagatataattaaaatattacttttttaattttaagtttaattgttgaatttgtgactattgatttattattctactatgtttaaattgttttatagatagtttaaagtaaatataagtaatgtagtagagtgttagagtgttaccctaaaccataaactataagatttatggtggactaattttcatatatttcttattgcttttaccttttcttggtatgtaagtccgtaactggaattactgtgggttgccatgacactctgtggtcttttggttcatgcatggatcttgcgcaagaaaaagacaaagaacaaagaaaaaagacaaaacagagagacaaaacgcaatcacacaaccaactcaaattagtcactggctgatcaagatcgccgcgtccatgtatgtctaaatgccatgcaaagcaacacgtgcttaacatgcactttaaatggctcacccatctcaacccacacacaaacacattgcctttttcttcatcatcaccacaaccacctgtatatattcattctcttccgccacctcaatttcttcacttcaacacacgtcaacctgcatatgcgtgtcatcccatgcccaaatctccatgcatgttccaaccaccttctctcttatataatacctataaatacctctaatatcactcacttctttcatcatccatccatccagagtactactactctactactataataccccaacccaactcatattcaatactactctaggatccacaaccaaaaatggcttcctctatgctctcttccgctactatggttgcctctccggctcaggccactatggtcgctcctttcaacggacttaagtcctccgctgccttcccagccacccgcaaggctaacaacgacattacttccatcacaagcaacggcggaagagttaactgcatgcaggtgtggcctccgattggaaagaagaagtttgagactctctcttaccttcctgaccttaccgattccgaagctgcaaggaacgtgagtgcggctcatgagatgcatgacgagaagaggatagctgttgtgggcatggctgttcagtatgctggatgcaaaacgaaagacgagttctgggaagttctcatgaatggaaaagttgagagcaaagtgatcagcgacaaacgtcttggttcaaattaccgtgctgaacactacaaagctgaaaggagcaagtatgctgacaccttctgcaatgagacatatggaactcttgatgagaacgaaatagacaatgagcatgaactccttttgaaccttgccaaacaagccttggctgaaacatctgtcaaagattcaacaagatgtggcatagtttctggatgcctcagcttcccgatggacaacctccaaggtgaactcttgaatgtgtaccagaaccatgttgagaagaaacttggtgccagagttttcaaagatgcctctcactggtcagaaagagaacagtccaacaaaccagaggctggtgacagaagaatcttcatggaccctgcttcctttgttgctgaggaactcaatcttggcgctctccactactctgttgatgctgcctgtgccactgcgctctatgtgctcagactggcgcaagatcacttggtctctggtgcagctgatgtgatgctttgtggtgcaacatgcctgccggagccgtttttcatactctctgggttctcaaccttccaagccatgcctgttggaacgggtcagaatgtgtccatgccgctgcacaaagattctcaaggattgacccctggtgaaggaggttccatcatggtcctcaaacgtttggatgacgcaatcagagatggagatcacatctatggaacacttttgggagccaatgtcagcaacagtggcactggtctgccacttaaaccccttttgccgtcagagaaaaagtgcctcatggacacctacacacgtatcaatgtgcatccccacaagattcagtatgttgaatgccatgcaactgggactccacaaggtgatcgtgtggaaattgatgctgtgaaggcttgctttgaaggcaaagtcccacgttttggaaccacaaaagggaactttggacacacattggtggcagctgggtttgctggcatgtgcaaagtgcttctctccatgaagcacgggatcattccacccactccgggaatagatgacgaaacgaagatggaccctctggttgtctctggtgaggccattccctggccagaaacgaatggagaaccgaagcgtgctggtctctcagcgtttggatttggtgggaccaatgctcatgctgtctttgaggaacatgacccaagcaatgctgcatgcactggccatgactccatttctgctctctctgcacgttgtggtggtgagtcaaacatgagaatagcaatcactgggatggatgccacttttggtgctttgaaaggattggatgcttttgaaagggccatctacactggtgctcatggtgctataccactcccagaaaagagatggagattcctggggaaagacaaggacttccttgatctttgtggagtcaaagcaacaccgcatggctgttacattgaagatgttgaagttgatttccagaggctgaggactccaatgactcctgaagatatgctcttgcctcaacagcttctggctgtcaccacaattgatagggccatattggactctggcatgaagaaaggtggaaatgtggctgtctttgtggggttggggaccgatcttgaactctaccgtcaccgtgcaagggttgctctcaaggagagagtgaggcctgaagccagcaagaaactcaatgacatgatgcagtacatcaatgattgtgggacaagcacttcttacaccagctacataggcaacttggttgcaacaagggtcagttcacaatggggcttcacgggaccttccttcacaatcacagaaggcaacaattctgtgtacagatgtgctgaacttggcaaatacctcttggaaacgggagaggttgatggggttgtggttgcgggtgttgatctctgtgggagtgctgagaacctttacgtcaagtcaaggcgtttcaaggtgtctacatctgacaccccgagagccagctttgatgcagctgctgatggttactttgttggagagggctgtggtgcatttgtgctcaagcgtgagacaagctgcaccaaggatgacagaatctatgcttgcatggatgccatagttcctggaaatgttccatctgcatgtttgagagaggcattggatcaagccagagtcaagcctggagacatcgagatgttggagctttctgctgattcagcgaggcatttgaaggacccgtctgttctcccaaaggaactcactgctgaggaagagattggcggacttcagacgattcttcgtgacgatgacaagctcccaaggaatgttgcaactggaagtgtcaaggccactgttggtgacactggttatgcttctggtgctgccagtttgattaaggctgcgctttgcatctacaaccgttacctgcccagcaatggagatgactgggatgaacctgcacctgaagcaccctgggacagcacactctttgcgtgccagacctcaagagcttggttgaagaaccctggtgagagacgttatgcggctgtttccggagtcagtgaaaccagaagttgctacagtgtgctgctttctgaagcagagggacactacgagagagagaacagaatcagtttggatgaggaagcacccaagctcattgtgttgagagcagactcccatgaagagattcttggaagattggacaagataagggaaaggttcttgcagcccacgggtgctgcacccagagagtctgaattgaaggcgcaagcccgtaggatctttcttgaactccttggtgagacccttgcccaagatgcagcttcatctggaagtcagaagccccttgctctcagcttggtctccactccatccaagctccagagagaggtggaacttgcggcaaaaggcattccgagatgtctcaagatgagacgtgattggagttcccctgctggaagcagatatgcgcctgagcctttggccagtgacagagttgccttcatgtatggagaaggaaggagcccttactatggcatcacacaagacattcataggatttggcctgaacttcatgaggtcatcaatgagaaaacaaaccgtctctgggctgaaggtgacagatgggtcatgccaagggccagcttcaagagtgagcttgagtcacaacagcaagagtttgacagaaacatgattgaaatgttccgtcttggaatcctcacctcaattgccttcacaaacctggcgagagatgttctcaacatcacgcccaaagcagcctttggactcagtttgggagagatttccatgatctttgctttctccaagaaaaacggtttgataagcgatcagttgacaaaggatttgagagagtcagatgtctggaacaaagctctggctgttgagttcaatgcgctcagagaagcctggggcattccacagtctgtcccaaaagatgagttctggcaaggttacatagtgaggggaacgaaacaagacatagaagcagccatagcaccagactcaaagtatgtgaggttgaccatcatcaatgatgccaacactgctctcatcagtggaaagcctgatgcatgcaaagctgcgattgctcgtcttggtggcaacatccctgcgcttccagtcactcaaggcatgtgtgggcattgcccagaggtgggaccttacaccaaggacatcgcaaagatccacgccaaccttgagttccctgtggttgatggtcttgatctctggactaccataaaccagaagaggcttgtgccaagagccacgggtgccaaagatgaatgggctccttcatcctttggggagtatgctggacagctctatgagaaacaagccaacttccctcagatagttgaaaccatctacaagcagaactatgatgtgtttgttgaagttgggccaaacaatcacagaagcacagcagtgagaaccacgcttggaccacagagaaaccaccttgctggtgccatagacaagcagaacgaggatgcttggacgacaatagtcaagctcgtggcttcattgaaggctcaccttgttcctggagtgaccatcagtccgctctaccactccaagctcgttgcagaggctgaggcttgttatgctgcgctctgtaaaggtgagaaacccaagaaaaacaagtttgtgagaaagattcagttgaatggcagattcaacagcaaggcagaccccatctcctcagcagaccttgcatccttcccacctgcggaccctgcgattgaagctgccatctcttcaaggatcatgaagcctgtggctccgaaattctatgcgcgtctcaacattgatgagcaagatgagaccagagatccgatcttgaacaaggacaatgcgccttccagctccagctcttccagcagttcctcttccagcagttcatctccgtctcctgctccttcagctccagttcagaagaaagctgccccagctgcggagacaaaagctgttgccagtgctgatgcacttcgtagtgccctgcttgatcttgactccatgcttgcgctcagctctgcaagtgcttctggcaaccttgttgagactgcgccatctgatgccagtgtcattgtccctccgtgcaacattgctgatcttggcagcagagctttcatgaaaacttatggtgtttctgcgcctctgtacaccggtgcaatggccaagggaattgcctctgcggacttggtgatcgcagctggaaggcaaggaatccttgcgtcatttggtgctggaggccttccaatgcaagttgtgcgtgagtccattgaaaagattcaagctgccctgcccaatggaccatatgctgtcaacctcatccattctccttttgacagcaaccttgagaagggaaatgttgatctcttcttggaaaagggtgtcacttttgttgaggcttcagccttcatgacgttgacaccgcaagttgtcagatacagagcggctgggttgacgaggaatgcagatgggtcagtcaacataaggaacagaatcattgggaaagtctccagaactgagctggctgaaatgttcatgcgtcctgcacctgagcatcttttgcagaagctcattgcttctggggagatcaatcaagaacaagctgagttggccagacgtgttcctgtggctgatgacattgcggttgaagctgattctggtggacacactgacaaccgtccaatccatgtcattctgcctctgattatcaacctgagggataggcttcacagagagtgtggatacccagcaaacctgagggttcgtgttggtgctgggggtggcattgggtgtccccaagctgcgctggcaactttcaacatgggtgcctctttcattgtcactggaacagtgaaccaagttgccaaacaatctgggacgtgtgacaatgtgaggaaacagcttgcgaaagcaacttactcagatgtttgcatggcaccggcagctgacatgtttgaggaaggtgtgaaacttcaagttttgaagaaaggaacaatgttcccttcaagagccaacaaactctatgagttgttctgcaagtatgattcttttgagtccatgcctccagcagagcttgcgagggttgagaaaagaatcttcagtcgtgcattggaagaggtctgggatgagaccaagaacttctacatcaaccgtctccacaacccagagaagatacagagggctgagagggaccccaaactgaagatgtcactgtgtttcagatggtatctgtccctggcttcaaggtgggccaacactggagcttctgacagagtcatggactaccaagtttggtgtggtcctgccattggttcattcaatgatttcatcaaaggaacttaccttgatccggcagtggcaaatgagtacccgtgtgttgtgcagatcaacaaacagattcttagaggagcgtgcttcttgaggcgtcttgaaatactgagaaatgcaaggctttcagatggtgcagctgcacttgtggcgagcattgatgacacatatgtccctgctgagaagctgtgagtagttagcttaatcacttaggtcaccagtatgaactaaaatgcatgtaggtgtaagagctcatggagagcatggaatattgtatccgaccatgtaacagtataataactgagctccatctcacttcttctatgaataaacaaaggatgttatgatatattaacactctatctatgcaccttattgttctatgataaatttcctcttattattataaatcatctgaatcgtgacggcttatggaatgcttcaaatagtacaaaaacaaatgtgtactataagactttctaaacaattctaactttagcattgtgaacgagacataagtgttaagaagacataacaattataatggaagaagtttgtctccatttatatattatatattacccacttatgtattatattaggatgttaaggagacataacaattataaagagagaagtttgtatccatttatatattatatactacccatttatatattatacttatccacttatttaatgtctttataaggtttgatccatgatatttctaatattttagttgatatgtatatgaaaaggtactatttgaactctcttactctgtataaaggttggatcatccttaaagtgggtctatttaattttattgcttcttacagataaaaaaaaaattatgagttggtttgataaaatattgaaggatttaaaataataataaataataaataacatataatatatgtatataaatttattataatataacatttatctataaaaaagtaaatattgtcataaatctatacaatcgtttagccttgctggaacgaatctcaattatttaaacgagagtaaacatatttgactttttggttatttaacaaattattatttaacactatatgaaattttttttttttatcagcaaagaataaaattaaattaagaaggacaatggtgtcccaatccttatacaaccaacttccacaagaaagtcaagtcagagacaacaaaaaaacaagcaaaggaaattttttaatttgagttgtcttgtttgctgcataatttatgcagtaaaacactacacataacccttttagcagtagagcaatggttgaccgtgtgcttagcttcttttattttatttttttatcagcaaagaataaataaaataaaatgagacacttcagggatgtttcaacccttatacaaaaccccaaaaacaagtttcctagcaccctaccaacgaattcgcggccgcttaattaatctgacctgaccactagacctgagtgagtacagatgtgctactagtgctagcctcgaggtcgaccaacttttctatacaaagttgtctagacctaggactaggcactgagtgactcactgacctgactgagtgactggcggccgcctcccagtatcattatagtgaaagttttggctctctcgccggtggttttttacctctatttaaaggggttttccacctaaaaattctggtatcattctcactttacttgttactttaatttctcataatctttggttgaaattatcacgcttccgcacacgatatccctacaaatttattatttgttaaacattttcaaaccgcataaaattttatgaagtcccgtctatctttaatgtagtctaacattttcatattgaaatatataatttacttaattttagcgttggtagaaagcataatgatttattcttattcttcttcatataaatgtttaatatacaatataaacaaattctttaccttaagaaggatttcccattttatattttaaaaatatatttatcaaatatttttcaaccacgtaaatctcataataataagttgtttcaaaagtaataaaatttaactccataatttttttattcgactgatcttaaagcaacacccagtgacacaactagccatttttttctttgaataaaaaaatccaattatcattgtattttttttatacaatgaaaatttcaccaaacaatgatttgtggtatttctgaagcaagtcatgttatgcaaaattctataattcccatttgacactacggaagtaactgaagatctgcttttacatgcgagacacatcttctaaagtaattttaataatagttactatattcaagatttcatatatcaaatactcaatattacttctaaaaaattaattagatataattaaaatattacttttttaattttaagtttaattgttgaatttgtgactattgatttattattctactatgtttaaattgttttatagatagtttaaagtaaatataagtaatgtagtagagtgttagagtgttaccctaaaccataaactataagatttatggtggactaattttcatatatttcttattgcttttaccttttcttggtatgtaagtccgtaactggaattactgtgggttgccatgacactctgtggtcttttggttcatgcatggatcttgcgcaagaaaaagacaaagaacaaagaaaaaagacaaaacagagagacaaaacgcaatcacacaaccaactcaaattagtcactggctgatcaagatcgccgcgtccatgtatgtctaaatgccatgcaaagcaacacgtgcttaacatgcactttaaatggctcacccatctcaacccacacacaaacacattgcctttttcttcatcatcaccacaaccacctgtatatattcattctcttccgccacctcaatttcttcacttcaacacacgtcaacctgcatatgcgtgtcatcccatgcccaaatctccatgcatgttccaaccaccttctctcttatataatacctataaatacctctaatatcactcacttctttcatcatccatccatccagagtactactactctactactataataccccaacccaactcatattcaatactactctaggatccacaaccaaaaatggcttcctctatgctctcttccgctactatggttgcctctccggctcaggccactatggtcgctcctttcaacggacttaagtcctccgctgccttcccagccacccgcaaggctaacaacgacattacttccatcacaagcaacggcggaagagttaactgcatgcaggtgtggcctccgattggaaagaagaagtttgagactctctcttaccttcctgaccttaccgattccgaagcgcttcgtgtcaagaccaacaagaagccatgttgggagatgaccaaggaggaactgacctctggcaaaactgaggtgttcaactatgaggaactcctggagtttgcagagggtgacatagctaaggtttttggtccggagtttgctgtcatagacaagtaccccagaagggtgaggctgcctgctcgtgaatacctgcttgtgacaagggtcacactcatggatgccgaggtcaacaactacagagttggtgccagaatggtcactgagtatgatcttccagtgaatggcgaattgtctgagggaggtgattgtccctgggcagttctggttgagagtggacagtgcgatttgatgctgatatcatacatgggaattgatttccagaaccaaggtgacagagtttaccgtctgctcaacaccacgttgacattctatggggttgcccatgagggagagacccttgagtatgacatcagagtgaccggttttgccaaacgtttggatggtggcatctccatgttcttctttgagtatgactgctatgtcaatgggaggcttctcattgagatgagagatggctgtgctggcttcttcacaaatgaggagcttgatgcgggaaagggtgtggtgttcacaagaggggatttggctgccagagctaagattccaaagcaagatgtttctccctatgctgtcgctccctgccttcacaaaacaaaactcaacgaaaaggagatgcagaccttggttgacaaagattgggcttccgtttttggctcaaagaatggcatgccggagatcaactacaaactctgcgcacgtaagatgctcatgattgatagagtcaccagcattgaccataagggaggtgtgtacggtttgggtcagttggttggtgagaaaatcttggagagggaccattggtacttcccatgccattttgttaaggatcaagtcatggctggatctcttgtcagcgacggttgttcacaaatgctcaagatgtacatgatctggctcggtttgcaccttaccaccggaccatttgacttcagacccgtcaacggacacccgaacaaagttaggtgtaggggtcagatatctcctcataagggaaagttggtctacgtcatggagatcaaagagatgggattcgacgaggataacgatccgtacgccattgctgacgtcaacatcattgacgttgatttcgaaaagggtcaagatttcagccttgatagaatcagcgactacggaaagggggatcttaacaaaaagatcgtcgtggacttcaagggcattgctctcaagatgcagaagagatccacgaacaagaacccctccaaagttcagcccgtttttgctaacggtgcagccactgtgggaccggaagcgtccaaggccagctctggtgccagtgctagtgcttctgctgcccctgcgaagcctgctttctcagcagatgttcttgcgccaaagccagttgcacttcctgaacatatcctcaagggtgacgctctcgctccgaaagaaatgtcctggcatcccatgtcaaaacttcctggcaacccgacgccgttcttctcccctagttcttaccctccgagggcaatttgcttcatccctttccctggcaacccacttgacaacaattgcaaagctggagaaatgcctctgaactggtacaacatgtcagagttcatgtgtggaaaagttagcaactgcttgggaccagagttcgcaagatttgataagtcaaatacgagcagaagccctgcttttgatttggctcttgtgactagagttgttgaagtcacaaacatggaacatggcaagttcctgaatgttgattgcaatcccagcaaaggcacaatggtgggggagtttgactgtcctcaagatgcgtggttctttgatggttcttgcaatgatgggcacatgccttattccatcatcatggaaatcggacttcagacatccggtgttctcaccagtgtgttgaaagcaccactgacgatggacaaagatgacattctctttaggaaccttgatgcaagtgctgaaatggtgaggccagatgtggatgtgagggggaaaaccataaggaatgtgaccaagtgcactggatatgcaatgttgggaaagatggggattcacagattcacgtttgagttgtctgttgatggcgtggttttctacaaaggaagcacttcctttggatggttcactccagaggtgtttgctcagcaagctggacttgacaatgggaaaaagacggagccttggtgcaaaactaacaacacgagtgtgagaagagttgaaatcgcatcagccaaaggcaaagaacagctgactgagaaacttccagatgcaactaatgctcaagttctcagaaggtcagaacagtgtgagtatttggattacctcaacattgctcctgattctgggctgcatgggaaaggatatgcgcatggacacaaagatgttaacccacaagactggttcttctcttgtcacttttggtttgatcctgtgatgcctggatctttgggaattgagtcaatgttccagctcattgaggcatttgcggtggaccagaacataccgggagaatacaatgtgagcaatccgacctttgcccatgcccctggaaaaacggcgtggaagtaccgtggtcaattgacaccaaagaaccgtgcgatggactgtgaggtgcacatagtttcaatcacagcctctcctgaaaatggaggctacgttgacatagtggcagatggagcactttgggttgatggtctccgtgtgtatgaagccaaagaactcagagttcgtgttgtcagtgcaaaacctcaagccattccggatgttcaacaacagccacccagcgcaaaagcggaccctgggaaaactggagttgcactcagtccgactcagttgagagatgtcctgcttgaagtggacaatccattgtatcttggtgttgaaaactccaatttggtgcagtttgaatccaaacctgcaacttcttcaaggattgtcagtatcaaaccatgctccataagtgatcttggtgacaagtccttcatggaaacgtacaatgtgtcagcacctctgtacactggagcaatggccaagggaattgcgtctgcggaccttgtcattgctgctgggaagaggaagatattgggttcttttggagcgggtgggcttccaatgcaccatgtgagggcagctttggagaagatacaagcggctctgcctcaaggaccatatgctgtgaacctcattcattcaccttttgacagcaacttggaaaaggggaatgttgatctcttcctcgaaaagggcgttactgtggtggaggcttctgcattcatgaccctcactccccaagttgttcgttaccgtgcagccggactctcaaggaacgctgatgggagtgtcaacatcagaaaccgtatcattggaaaagtgtccagaacagaactcgccgaaatgttcatcagaccggctccggaacacctccttgagaaactcatagcttctggtgagataacacaagaacaagccgaacttgcccgtcgtgttcctgtcgcagacgacatcgctgttgaagctgattctggtggtcacactgacaaccgtcccatccacgtcatcttgcctttgatcatcaaccttaggaacagactgcacagagagtgtggttatcctgcgcaccttagagtcagagttggagctggaggcggtgttggctgcccacaagctgctgcggctgccctcacaatgggagctgccttcatagtgactgggactgtcaatcaagttgctaaacagtccgggacatgtgacaacgtgagaaaacaactcagtcaagccacctacagtgacatttgcatggctccagcagctgatatgtttgaggaaggtgtgaaactccaagttctcaagaagggaacaatgttcccatcaagagctaacaaattgtacgaactcttttgcaagtacgactctttcgattcaatgcctcctgctgaacttgaaaggatcgagaagaggatcttcaagagggcacttcaagaggtctgggaagagaccaaggacttttacatcaatggtttgaagaatccagagaagatacagagagcggaacatgaccccaaactcaagatgtctttgtgtttcagatggtatcttggtcttgcatcacgttgggccaacatgggtgctcctgatcgtgtcatggactatcaagtctggtgtggtccagccattggagccttcaatgacttcatcaaaggaacatatcttgatcctgctgtctctaatgagtacccatgtgttgtccagatcaaccttcagattttgcgtggtgcatgttacctgaggcgtcttaatgctctgagaaatgatccgaggattgatcttgagactgaagatgctgcctttgtctatgagccaacgaatgcgctttgagtagttagcttaatcacttaggtcaccagtatgaactaaaatgcatgtaggtgtaagagctcatggagagcatggaatattgtatccgaccatgtaacagtataataactgagctccatctcacttcttctatgaataaacaaaggatgttatgatatattaacactctatctatgcaccttattgttctatgataaatttcctcttattattataaatcatctgaatcgtgacggcttatggaatgcttcaaatagtacaaaaacaaatgtgtactataagactttctaaacaattctaactttagcattgtgaacgagacataagtgttaagaagacataacaattataatggaagaagtttgtctccatttatatattatatattacccacttatgtattatattaggatgttaaggagacataacaattataaagagagaagtttgtatccatttatatattatatactacccatttatatattatacttatccacttatttaatgtctttataaggtttgatccatgatatttctaatattttagttgatatgtatatgaaaaggtactatttgaactctcttactctgtataaaggttggatcatccttaaagtgggtctatttaattttattgcttcttacagataaaaaaaaaattatgagttggtttgataaaatattgaaggatttaaaataataataaataataaataacatataatatatgtatataaatttattataatataacatttatctataaaaaagtaaatattgtcataaatctatacaatcgtttagccttgctggaacgaatctcaattatttaaacgagagtaaacatatttgactttttggttatttaacaaattattatttaacactatatgaaattttttttttttatcagcaaagaataaaattaaattaagaaggacaatggtgtcccaatccttatacaaccaacttccacaagaaagtcaagtcagagacaacaaaaaaacaagcaaaggaaattttttaatttgagttgtcttgtttgctgcataatttatgcagtaaaacactacacataacccttttagcagtagagcaatggttgaccgtgtgcttagcttcttttattttatttttttatcagcaaagaataaataaaataaaatgagacacttcagggatgtttcaacccttatacaaaaccccaaaaacaagtttcctagcaccctaccaacgaattcgcggccgcttaattaatcacgagtggatgactgtcacgactgactcatgactgactactagtgctagcctcgaggtcgacacaactttgtataataaagttgtctagacctaggagctgtgctgggtaactcacatgagtcactggtcacatcagcggccgcctcccagtatcattatagtgaaagttttggctctctcgccggtggttttttacctctatttaaaggggttttccacctaaaaattctggtatcattctcactttacttgttactttaatttctcataatctttggttgaaattatcacgcttccgcacacgatatccctacaaatttattatttgttaaacattttcaaaccgcataaaattttatgaagtcccgtctatctttaatgtagtctaacattttcatattgaaatatataatttacttaattttagcgttggtagaaagcataatgatttattcttattcttcttcatataaatgtttaatatacaatataaacaaattctttaccttaagaaggatttcccattttatattttaaaaatatatttatcaaatatttttcaaccacgtaaatctcataataataagttgtttcaaaagtaataaaatttaactccataatttttttattcgactgatcttaaagcaacacccagtgacacaactagccatttttttctttgaataaaaaaatccaattatcattgtattttttttatacaatgaaaatttcaccaaacaatgatttgtggtatttctgaagcaagtcatgttatgcaaaattctataattcccatttgacactacggaagtaactgaagatctgcttttacatgcgagacacatcttctaaagtaattttaataatagttactatattcaagatttcatatatcaaatactcaatattacttctaaaaaattaattagatataattaaaatattacttttttaattttaagtttaattgttgaatttgtgactattgatttattattctactatgtttaaattgttttatagatagtttaaagtaaatataagtaatgtagtagagtgttagagtgttaccctaaaccataaactataagatttatggtggactaattttcatatatttcttattgcttttaccttttcttggtatgtaagtccgtaactggaattactgtgggttgccatgacactctgtggtcttttggttcatgcatggatcttgcgcaagaaaaagacaaagaacaaagaaaaaagacaaaacagagagacaaaacgcaatcacacaaccaactcaaattagtcactggctgatcaagatcgccgcgtccatgtatgtctaaatgccatgcaaagcaacacgtgcttaacatgcactttaaatggctcacccatctcaacccacacacaaacacattgcctttttcttcatcatcaccacaaccacctgtatatattcattctcttccgccacctcaatttcttcacttcaacacacgtcaacctgcatatgcgtgtcatcccatgcccaaatctccatgcatgttccaaccaccttctctcttatataatacctataaatacctctaatatcactcacttctttcatcatccatccatccagagtactactactctactactataataccccaacccaactcatattcaatactactctaggatccacaaccaaaaatggcttcctctatgctctcttccgctactatggttgcctctccggctcaggccactatggtcgctcctttcaacggacttaagtcctccgctgccttcccagccacccgcaaggctaacaacgacattacttccatcacaagcaacggcggaagagttaactgcatgcaggtgtggcctccgattggaaagaagaagtttgagactctctcttaccttcctgaccttaccgattccgaacttcagcacacttggcttccgaagcctcccaatctgaccctcttgtcagatgaggttcatctctggaggattcctcttgaccagcctgagtcacaacttcaagaccttgctgccaccctgagcagtgatgaattggcgagggcaaacagattctactttccagaacacagaaggcgtttcactgctgggagaggcatcctcagatccatcttgggtggatacttgggagtggaaccgggtcaagtcaagtttgattatgagtcccgtgggaaaccgatccttggtgacagatttgctgagagtggactcctgttcaacttgtctcacagccagaaccttgccttgtgtgctgtcaactacacgcgtcaaataggcattgatcttgaatatctgcgtccaacatctgacttggagtctcttgcaaagaggttctttctcccaagagaatatgaactcttgaggtcactccctgatgagcagaaacagaagattttctttcgttactggacttgcaaagaggcttatctcaaagcaacgggagatggaatagccaaacttgaagagatcgagatagcactcaccccaacagaacctgccaagctccaaacagctcctgcgtggtctctgttggagcttgtgccagatgacaattgtgttgcagctgtggctgttgcgggttttggttggcagcccaagttctggcattactgagtagttagcttaatcacttaggtcaccagtatgaactaaaatgcatgtaggtgtaagagctcatggagagcatggaatattgtatccgaccatgtaacagtataataactgagctccatctcacttcttctatgaataaacaaaggatgttatgatatattaacactctatctatgcaccttattgttctatgataaatttcctcttattattataaatcatctgaatcgtgacggcttatggaatgcttcaaatagtacaaaaacaaatgtgtactataagactttctaaacaattctaactttagcattgtgaacgagacataagtgttaagaagacataacaattataatggaagaagtttgtctccatttatatattatatattacccacttatgtattatattaggatgttaaggagacataacaattataaagagagaagtttgtatccatttatatattatatactacccatttatatattatacttatccacttatttaatgtctttataaggtttgatccatgatatttctaatattttagttgatatgtatatgaaaaggtactatttgaactctcttactctgtataaaggttggatcatccttaaagtgggtctatttaattttattgcttcttacagataaaaaaaaaattatgagttggtttgataaaatattgaaggatttaaaataataataaataataaataacatataatatatgtatataaatttattataatataacatttatctataaaaaagtaaatattgtcataaatctatacaatcgtttagccttgctggaacgaatctcaattatttaaacgagagtaaacatatttgactttttggttatttaacaaattattatttaacactatatgaaattttttttttttatcagcaaagaataaaattaaattaagaaggacaatggtgtcccaatccttatacaaccaacttccacaagaaagtcaagtcagagacaacaaaaaaacaagcaaaggaaattttttaatttgagttgtcttgtttgctgcataatttatgcagtaaaacactacacataacccttttagcagtagagcaatggttgaccgtgtgcttagcttcttttattttatttttttatcagcaaagaataaataaaataaaatgagacacttcagggatgtttcaacccttatacaaaaccccaaaaacaagtttcctagcaccctaccaacgaattcgcggccgcttaattaactactgtcactgaggccgtagacgagtacggactgatctaactagtgctagcctcgaggtcgacacccagctttcttgtacaaagtggttgcggccgcttaattaaatttaaattcaattaatgcaatcttgattttcaacaacgaaggtaatggcgtaaaagaaaaaatgtatgttattgtattgatctttcatgatgttgaagcgtgccataatatgatgatgtataattaaaatattaactgtcgcattttattgaaatggcactgttatttcaaccatatctttgattctgttacatgacacgactgcaagaagtaaataatagacgccgttgttaaagaattgctatcatatgtgcctaactagagggaatttgagcgtcagacctaatcaaatattacaaaatatctcactctgtcgccagcaatggtgtaatcagcgcagacaaatggcgtaaagatcgcggaaaaacctccccgagtggcatgatagctgcctctgtattgctgatttagtcagccttatttgacttaagggtgccctcgttagtgacaaattgctttcaaggagacagccatgccccacactttgttgaaaaacaaattgcctttggggagacggtaaagccagttgctcttcaataaggaatgtcgaggaggcaatgtaaccgcctctggtagtacacttctctaatccaaaaatcaatttgtattcaagataccgcaaaaaacttatggtttaaaccctgcaggactagtccagaaggtaattatccaagatgtagcatcaagaatccaatgtttacgggaaaaactatggaagtattatgtaagctcagcaagaagcagatcaatatgcggcacatatgcaacctatgttcaaaaatgaagaatgtacagatacaagatcctatactgccagaatacgaagaagaatacgtagaaattgaaaaagaagaaccaggcgaagaaaagaatcttgaagacgtaagcactgacgacaacaatgaaaagaagaagataaggtcggtgattgtgaaagagacatagaggacacatgtaaggtggaaaatgtaagggcggaaagtaaccttatcacaaaggaatcttatcccccactacttatccttttatatttttccgtgtcatttttgcccttgagttttcctatataaggaaccaagttcggcatttgtgaaaacaagaaaaaatttggtgtaagctattttctttgaagtactgaggatacaacttcagagaaatttgtaagtttgtaggtaccagatctggatcccaaaccatgtctccggagaggagaccagttgagattaggccagctacagcagctgatatggccgcggtttgtgatatcgttaaccattacattgagacgtctacagtgaactttaggacagagccacaaacaccacaagagtggattgatgatctagagaggttgcaagatagatacccttggttggttgctgaggttgagggtgttgtggctggtattgcttacgctgggccctggaaggctaggaacgcttacgattggacagttgagagtactgtttacgtgtcacataggcatcaaaggttgggcctaggatctacattgtacacacatttgcttaagtctatggaggcgcaaggttttaagtctgtggttgctgttataggccttccaaacgatccatctgttaggttgcatgaggctttgggatacacagcccggggtacattgcgcgcagctggatacaagcatggtggatggcatgatgttggtttttggcaaagggattttgagttgccagctcctccaaggccagttaggccagttacccaaatctgagtagttagcttaatcacctagagctcgatcggcggcaatagcttcttagcgccatcccgggttgatcctatctgtgttgaaatagttgcggtgggcaaggctctctttcagaaagacaggcggccaaaggaacccaaggtgaggtgggctatggctctcagttccttgtggaagcgcttggtctaaggtgcagaggtgttagcgggatgaagcaaaagtgtccgattgtaacaagatatgttgatcctacgtaaggatattaaagtatgtattcatcactaatataatcagtgtattccaatatgtactacgatttccaatgtctttattgtcgccgtatgtaatcggcgtcacaaaataatccccggtgactttcttttaatccaggatgaaataatatgttattataatttttgcgatttggtccgttataggaattgaagtgtgcttgaggtcggtcgccaccactcccatttcataattttacatgtatttgaaaaataaaaatttatggtattcaatttaaacacgtatacttgtaaagaatgatatcttgaaagaaatatagtttaaatatttattgataaaataacaagtcaggtattatagtccaagcaaaaacataaatttattgatgcaagtttaaattcagaaatatttcaataactgattatatcagctggtacattgccgtagatgaaagactgagtgcgatattatggtgtaatacataggaattcgtttaaacgatctgcgtctaattttcggtccaacttgcacaggaaagacgtcgaccgcggtagctcttgcccagcagactgggcttccagtcctttcgctcgatcgggtccaatgttgtcctcagctgtgaaccggaagcggacgaccaacagtggaagaactgaaaggaacgagccgtctataccttgatgatcggcctctggtgaagggtatcatcgcagccaagcaagctcatgaaaggctgatgggggaggtgtataattatgaggcccacggcgggcttattctttagggaggatctatctcgttgctcaagtgcatggcgcaaagcagttattggagtgcggattttcgttggcatattattcgccacgagttagcagacgaagagaccttcatgaacgtggccaaggccagagttaagcagatgttacgccctgctgcaggcctttctattatccaatagttggttgatctttggaaagagcctcggctgaggcccatactgaaagagatcgatggatatcgatatgccatgttgtttgctagccagaaccagatcacatccgatatgctattgcagcttgacgcagatatggaggataagttgattcatgggatcgctcaggagtagctcatccatgcacgccgacaagaacagaaattccgtcgagttaacgcagccgcttacgacggattcgaaggtcatccattcggaatgtattagtttgcaccagctccgcgtcacacctgtcttcatttgaataagatgttagcaattgtttttagctttgtcttgttgtggcagggcggcaagtgcttcagacatcattctgttttcaaattttatgctggagaacagcttcttaattcctttggaaataatagactgcgtcttaaaattcagatgtctggatatagatatgattgtaaaataacctatttaagtgtcatttagaacataagttttatgaatgttcttccattttcgtcatcgaacgaataagagtaaatacaccttttttaacattacaaataagttcttatacgttgtttatacaccgggaatcatttccattattttcgcgcaaaagtcacggatattcgtgaaagcgacataaactgcgaaatttgcggggagtgtcttgagtttgcctcgaggctagcgcatgcacatagacacacacatcatctcattgatgcttggtaataattgtcattagattgtttttatgcatagatgcactcgaaatcagccaattttagacaagtatcaaacggatgtgacttcagtacattaaaaacgtccgcaatgtgttattaagttgtctaagcgtcaatttgatttacaattgaatatatcctgccccagccagccaacagctcgatttacaattgaatatatcctgccggccggcccacgcgtgtcgaggaattctgatctggcccccatttggacgtgaatgtagacacgtcgaaataaagatttccgaattagaataatttgtttattgctttcgcctataaatacgacggatcgtaatttgtcgttttatcaaaatgtactttcattttataataacgctgcggacatctacatttttgaattgaaaaaaaattggtaattactctttctttttctccatattgaccatcatactcattgctgatccatgtagatttcccggacatgaagccatttacaattgaatatatcctgccgccgctgccgctttgcacccggtggagcttgcatgttggtttctacgcagaactgagccggttaggcagataatttccattgagaactgagccatgtgcaccttccccccaacacggtgagcgacggggcaacggagtgatccacatgggacttttaaacatcatccgtcggatggcgttgcgagagaagcagtcgatccgtgagatcagccgacgcaccgggcaggcgcgcaacacgatcgcaaagtatttgaacgcaggtacaatcgagccgacgttcacgcggaacgaccaagcaagcttggctgccatttttggggtgaggccgttcgcggccgaggggcgcagcccctggggggatgggaggcccgcgttagcgggccgggagggttcgagaagggggggcaccccccttcggcgtgcgcggtcacgcgcacagggcgcagccctggttaaaaacaaggtttataaatattggtttaaaagcaggttaaaagacaggttagcggtggccgaaaaacgggcggaaacccttgcaaatgctggattttctgcctgtggacagcccctcaaatgtcaataggtgcgcccctcatctgtcagcactctgcccctcaagtgtcaaggatcgcgcccctcatctgtcagtagtcgcgcccctcaagtgtcaataccgcagggcacttatccccaggcttgtccacatcatctgtgggaaactcgcgtaaaatcaggcgttttcgccgatttgcgaggctggccagctccacgtcgccggccgaaatcgagcctgcccctcatctgtcaacgccgcgccgggtgagtcggcccctcaagtgtcaacgtccgcccctcatctgtcagtgagggccaagttttccgcgaggtatccacaacgccggcggccgcggtgtctcgcacacggcttcgacggcgtttctggcgcgtttgcagggccatagacggccgccagcccagcggcgagggcaaccagcccggtgagcgtcggaaagggtcgacggatcttttccgctgcataaccctgcttcggggtcattatagcgattttttcggtatatccatcctttttcgcacgatatacaggattttgccaaagggttcgtgtagactttccttggtgtatccaacggcgtcagccgggcaggataggtgaagtaggcccacccgcgagcgggtgttccttcttcactgtcccttattcgcacctggcggtgctcaacgggaatcctgctctgcgaggctggccggctaccgccggcgtaacagatgagggcaagcggatggctgatgaaaccaagccaaccaggaagggcagcccacctatcaaggtgtactgccttccagacgaacgaagagcgattgaggaaaaggcggcggcggccggcatgagcctgtcggcctacctgctggccgtcggccagggctacaaaatcacgggcgtcgtggactatgagcacgtccgcgagctggcccgcatcaatggcgacctgggccgcctgggcggcctgctgaaactctggctcaccgacgacccgcgcacggcgcggttcggtgatgccacgatcctcgccctgctggcgaagatcgaagagaagcaggacgagcttggcaaggtcatgatgggcgtggtccgcccgagggcagagccatgacttttttagccgctaaaacggccggggggtgcgcgtgattgccaagcacgtccccatgcgctccatcaagaagagcgacttcgcggagctggtattcgtgcagggcaagattcggaataccaagtacgagaaggacggccagacggtctacgggaccgacttcattgccgataaggtggattatctggacaccaaggcaccaggcgggtcaaatcaggaataagggcacattgccccggcgtgagtcggggcaatcccgcaaggagggtgaatgaatcggacgtttgaccggaaggcatacaggcaagaactgatcgacgcggggttttccgccgaggatgccgaaaccatcgcaagccgcaccgtcatgcgtgcgccccgcgaaaccttccagtccgtcggctcgatggtccagcaagctacggccaagatcgagcgcgacagcgtgcaactggctccccctgccctgcccgcgccatcggccgccgtggagcgttcgcgtcgtctcgaacaggaggcggcaggtttggcgaagtcgatgaccatcgacacgcgaggaactatgacgaccaagaagcgaaaaaccgccggcgaggacctggcaaaacaggtcagcgaggccaagcaggccgcgttgctgaaacacacgaagcagcagatcaaggaaatgcagctttccttgttcgatattgcgccgtggccggacacgatgcgagcgatgccaaacgacacggcccgctctgccctgttcaccacgcgcaacaagaaaatcccgcgcgaggcgctgcaaaacaaggtcattttccacgtcaacaaggacgtgaagatcacctacaccggcgtcgagctgcgggccgacgatgacgaactggtgtggcagcaggtgttggagtacgcgaagcgcacccctatcggcgagccgatcaccttcacgttctacgagctttgccaggacctgggctggtcgatcaatggccggtattacacgaaggccgaggaatgcctgtcgcgcctacaggcgacggcgatgggcttcacgtccgaccgcgttgggcacctggaatcggtgtcgctgctgcaccgcttccgcgtcctggaccgtggcaagaaaacgtcccgttgccaggtcctgatcgacgaggaaatcgtcgtgctgtttgctggcgaccactacacgaaattcatatgggagaagtaccgcaagctgtcgccgacggcccgacggatgttcgactatttcagctcgcaccgggagccgtacccgctcaagctggaaaccttccgcctcatgtgcggatcggattccacccgcgtgaagaagtggcgcgagcaggtcggcgaagcctgcgaagagttgcgaggcagcggcctggtggaacacgcctgggtcaatgatgacctggtgcattgcaaacgctagggccttgtggggtcagttccggctgggggttcagcagccagcgctttactggcatttcaggaacaagcgggcactgctcgacgcacttgcttcgctcagtatcgctcgggacgcacggcgcgctctacgaactgccgataaacagaggattaaaattgacaattgtgattaaggctcagattcgacggcttggagcggccgacgtgcaggatttccgcgagatccgattgtcggccctgaagaaagctccagagatgttcgggtccgtttacgagcacgaggagaaaaagcccatggaggcgttcgctgaacggttgcgagatgccgtggcattcggcgcctacatcgacggcgagatcattgggctgtcggtcttcaaacaggaggacggccccaaggacgctcacaaggcgcatctgtccggcgttttcgtggagcccgaacagcgaggccgaggggtcgccggtatgctgctgcgggcgttgccggcgggtttattgctcgtgatgatcgtccgacagattccaacgggaatctggtggatgcgcatcttcatcctcggcgcacttaatatttcgctattctggagcttgttgtttatttcggtctaccgcctgccgggcggggtcgcggcgacggtaggcgctgtgcagccgctgatggtcgtgttcatctctgccgctctgctaggtagcccgatacgattgatggcggtcctgggggctatttgcggaactgcgggcgtggcgctgttggtgttgacaccaaacgcagcgctagatcctgtcggcgtcgcagcgggcctggcgggggcggtttccatggcgttcggaaccgtgctgacccgcaagtggcaacctcccgtgcctctgctcacctttaccgcctggcaactggcggccggaggacttctgctcgttccagtagctttagtgtttgatccgccaatcccgatgcctacaggaaccaatgttctcggcctggcgtggctcggcctgatcggagcgggtttaacctacttcctttggttccgggggatctcgcgactcgaacctacagttgtttccttactgggctttctcagcccccgagcgcttagtgggaatttgtaccccttatcgaaccgggagcacaggatgacgcctaacaattcattcaagccgacaccgcttcgcggcgcggcttaattcaggagttaaacatcatgagggaagcggtgatcgccgaagtatcgactcaactatcagaggtagttggcgtcatcgagcgccatctcgaaccgacgttgctggccgtacatttgtacggctccgcagtggatggcggcctgaagccacacagtgatattgatttgctggttacggtgaccgtaaggcttgatgaaacaacgcggcgagctttgatcaacgaccttttggaaacttcggcttcccctggagagagcgagattctccgcgctgtagaagtcaccattgttgtgcacgacgacatcattccgtggcgttatccagctaagcgcgaactgcaatttggagaatggcagcgcaatgacattcttgcaggtatcttcgagccagccacgatcgacattgatctggctatcttgctgacaaaagcaagagaacatagcgttgccttggtaggtccagcggcggaggaactctttgatccggttcctgaacaggatctatttgaggcgctaaatgaaaccttaacgctatggaactcgccgcccgactgggctggcgatgagcgaaatgtagtgcttacgttgtcccgcatttggtacagcgcagtaaccggcaaaatcgcgccgaaggatgtcgctgccgactgggcaatggagcgcctgccggcccagtatcagcccgtcatacttgaagctaggcaggcttatcttggacaagaagatcgcttggcctcgcgcgcagatcagttggaagaatttgttcactacgtgaaaggcgagatcaccaaggtagtcggcaaataatgtctaacaattcgttcaagccgacgccgcttcgcggcgcggcttaactcaagcgttagagagctggggaagactatgcgcgatctgttgaaggtggttctaagcctcgtcttgcgatggcatttcgatccattcccattccgcgctcaagatggcttcccctcggcagttcatcagggctaaatcaatctagccgacttgtccggtgaaatgggctgcactccaacagaaacaatcaaacaaacatacacagcgacttattcacacgagctcaaattacaacggtatatatcctgccagtcagcatcatcacaccaaaagttaggcccgaatagtttgaaattagaaagctcgcaattgaggtctacaggccaaattcgctcttagccgtacaatattactcaccggatcctaaccggtttaattaaggcgcgccatgcccgggcaagcggccgcacaagttt

SEQ ID NO: 55 - DNA, 40406 bp, Artificial sequence
  plasmid pDAB9396
cttgtacaaagtggttgcggccgcttaattaaatttaaattcaattaatgcaatcttgattttcaacaacgaaggtaatggcgtaaaagaaaaaatgtatgttattgtattgatctttcatgatgttgaagcgtgccataatatgatgatgtataattaaaatattaactgtcgcattttattgaaatggcactgttatttcaaccatatctttgattctgttacatgacacgactgcaagaagtaaataatagacgccgttgttaaagaattgctatcatatgtgcctaactagagggaatttgagcgtcagacctaatcaaatattacaaaatatctcactctgtcgccagcaatggtgtaatcagcgcagacaaatggcgtaaagatcgcggaaaaacctccccgagtggcatgatagctgcctctgtattgctgatttagtcagccttatttgacttaagggtgccctcgttagtgacaaattgctttcaaggagacagccatgccccacactttgttgaaaaacaaattgcctttggggagacggtaaagccagttgctcttcaataaggaatgtcgaggaggcaatgtaaccgcctctggtagtacacttctctaatccaaaaatcaatttgtattcaagataccgcaaaaaacttatggtttaaaccctgcaggactagtccagaaggtaattatccaagatgtagcatcaagaatccaatgtttacgggaaaaactatggaagtattatgtaagctcagcaagaagcagatcaatatgcggcacatatgcaacctatgttcaaaaatgaagaatgtacagatacaagatcctatactgccagaatacgaagaagaatacgtagaaattgaaaaagaagaaccaggcgaagaaaagaatcttgaagacgtaagcactgacgacaacaatgaaaagaagaagataaggtcggtgattgtgaaagagacatagaggacacatgtaaggtggaaaatgtaagggcggaaagtaaccttatcacaaaggaatcttatcccccactacttatccttttatatttttccgtgtcatttttgcccttgagttttcctatataaggaaccaagttcggcatttgtgaaaacaagaaaaaatttggtgtaagctattttctttgaagtactgaggatacaacttcagagaaatttgtaagtttgtaggtaccagatctggatcccaaaccatgtctccggagaggagaccagttgagattaggccagctacagcagctgatatggccgcggtttgtgatatcgttaaccattacattgagacgtctacagtgaactttaggacagagccacaaacaccacaagagtggattgatgatctagagaggttgcaagatagatacccttggttggttgctgaggttgagggtgttgtggctggtattgcttacgctgggccctggaaggctaggaacgcttacgattggacagttgagagtactgtttacgtgtcacataggcatcaaaggttgggcctaggatctacattgtacacacatttgcttaagtctatggaggcgcaaggttttaagtctgtggttgctgttataggccttccaaacgatccatctgttaggttgcatgaggctttgggatacacagcccggggtacattgcgcgcagctggatacaagcatggtggatggcatgatgttggtttttggcaaagggattttgagttgccagctcctccaaggccagttaggccagttacccaaatctgagtagttagcttaatcacctagagctcgatcggcggcaatagcttcttagcgccatcccgggttgatcctatctgtgttgaaatagttgcggtgggcaaggctctctttcagaaagacaggcggccaaaggaacccaaggtgaggtgggctatggctctcagttccttgtggaagcgcttggtctaaggtgcagaggtgttagcgggatgaagcaaaagtgtccgattgtaacaagatatgttgatcctacgtaaggatattaaagtatgtattcatcactaatataatcagtgtattccaatatgtactacgatttccaatgtctttattgtcgccgtatgtaatcggcgtcacaaaataatccccggtgactttcttttaatccaggatgaaataatatgttattataatttttgcgatttggtccgttataggaattgaagtgtgcttgaggtcggtcgccaccactcccatttcataattttacatgtatttgaaaaataaaaatttatggtattcaatttaaacacgtatacttgtaaagaatgatatcttgaaagaaatatagtttaaatatttattgataaaataacaagtcaggtattatagtccaagcaaaaacataaatttattgatgcaagtttaaattcagaaatatttcaataactgattatatcagctggtacattgccgtagatgaaagactgagtgcgatattatggtgtaatacataggaattcgtttaaacgatctgcgtctaattttcggtccaacttgcacaggaaagacgtcgaccgcggtagctcttgcccagcagactgggcttccagtcctttcgctcgatcgggtccaatgttgtcctcagctgtgaaccggaagcggacgaccaacagtggaagaactgaaaggaacgagccgtctataccttgatgatcggcctctggtgaagggtatcatcgcagccaagcaagctcatgaaaggctgatgggggaggtgtataattatgaggcccacggcgggcttattctttagggaggatctatctcgttgctcaagtgcatggcgcaaagcagttattggagtgcggattttcgttggcatattattcgccacgagttagcagacgaagagaccttcatgaacgtggccaaggccagagttaagcagatgttacgccctgctgcaggcctttctattatccaatagttggttgatctttggaaagagcctcggctgaggcccatactgaaagagatcgatggatatcgatatgccatgttgtttgctagccagaaccagatcacatccgatatgctattgcagcttgacgcagatatggaggataagttgattcatgggatcgctcaggagtagctcatccatgcacgccgacaagaacagaaattccgtcgagttaacgcagccgcttacgacggattcgaaggtcatccattcggaatgtattagtttgcaccagctccgcgtcacacctgtcttcatttgaataagatgttagcaattgtttttagctttgtcttgttgtggcagggcggcaagtgcttcagacatcattctgttttcaaattttatgctggagaacagcttcttaattcctttggaaataatagactgcgtcttaaaattcagatgtctggatatagatatgattgtaaaataacctatttaagtgtcatttagaacataagttttatgaatgttcttccattttcgtcatcgaacgaataagagtaaatacaccttttttaacattacaaataagttcttatacgttgtttatacaccgggaatcatttccattattttcgcgcaaaagtcacggatattcgtgaaagcgacataaactgcgaaatttgcggggagtgtcttgagtttgcctcgaggctagcgcatgcacatagacacacacatcatctcattgatgcttggtaataattgtcattagattgtttttatgcatagatgcactcgaaatcagccaattttagacaagtatcaaacggatgtgacttcagtacattaaaaacgtccgcaatgtgttattaagttgtctaagcgtcaatttgatttacaattgaatatatcctgccccagccagccaacagctcgatttacaattgaatatatcctgccggccggcccacgcgtgtcgaggaattctgatctggcccccatttggacgtgaatgtagacacgtcgaaataaagatttccgaattagaataatttgtttattgctttcgcctataaatacgacggatcgtaatttgtcgttttatcaaaatgtactttcattttataataacgctgcggacatctacatttttgaattgaaaaaaaattggtaattactctttctttttctccatattgaccatcatactcattgctgatccatgtagatttcccggacatgaagccatttacaattgaatatatcctgccgccgctgccgctttgcacccggtggagcttgcatgttggtttctacgcagaactgagccggttaggcagataatttccattgagaactgagccatgtgcaccttccccccaacacggtgagcgacggggcaacggagtgatccacatgggacttttaaacatcatccgtcggatggcgttgcgagagaagcagtcgatccgtgagatcagccgacgcaccgggcaggcgcgcaacacgatcgcaaagtatttgaacgcaggtacaatcgagccgacgttcacgcggaacgaccaagcaagcttggctgccatttttggggtgaggccgttcgcggccgaggggcgcagcccctggggggatgggaggcccgcgttagcgggccgggagggttcgagaagggggggcaccccccttcggcgtgcgcggtcacgcgcacagggcgcagccctggttaaaaacaaggtttataaatattggtttaaaagcaggttaaaagacaggttagcggtggccgaaaaacgggcggaaacccttgcaaatgctggattttctgcctgtggacagcccctcaaatgtcaataggtgcgcccctcatctgtcagcactctgcccctcaagtgtcaaggatcgcgcccctcatctgtcagtagtcgcgcccctcaagtgtcaataccgcagggcacttatccccaggcttgtccacatcatctgtgggaaactcgcgtaaaatcaggcgttttcgccgatttgcgaggctggccagctccacgtcgccggccgaaatcgagcctgcccctcatctgtcaacgccgcgccgggtgagtcggcccctcaagtgtcaacgtccgcccctcatctgtcagtgagggccaagttttccgcgaggtatccacaacgccggcggccgcggtgtctcgcacacggcttcgacggcgtttctggcgcgtttgcagggccatagacggccgccagcccagcggcgagggcaaccagcccggtgagcgtcggaaagggtcgacggatcttttccgctgcataaccctgcttcggggtcattatagcgattttttcggtatatccatcctttttcgcacgatatacaggattttgccaaagggttcgtgtagactttccttggtgtatccaacggcgtcagccgggcaggataggtgaagtaggcccacccgcgagcgggtgttccttcttcactgtcccttattcgcacctggcggtgctcaacgggaatcctgctctgcgaggctggccggctaccgccggcgtaacagatgagggcaagcggatggctgatgaaaccaagccaaccaggaagggcagcccacctatcaaggtgtactgccttccagacgaacgaagagcgattgaggaaaaggcggcggcggccggcatgagcctgtcggcctacctgctggccgtcggccagggctacaaaatcacgggcgtcgtggactatgagcacgtccgcgagctggcccgcatcaatggcgacctgggccgcctgggcggcctgctgaaactctggctcaccgacgacccgcgcacggcgcggttcggtgatgccacgatcctcgccctgctggcgaagatcgaagagaagcaggacgagcttggcaaggtcatgatgggcgtggtccgcccgagggcagagccatgacttttttagccgctaaaacggccggggggtgcgcgtgattgccaagcacgtccccatgcgctccatcaagaagagcgacttcgcggagctggtattcgtgcagggcaagattcggaataccaagtacgagaaggacggccagacggtctacgggaccgacttcattgccgataaggtggattatctggacaccaaggcaccaggcgggtcaaatcaggaataagggcacattgccccggcgtgagtcggggcaatcccgcaaggagggtgaatgaatcggacgtttgaccggaaggcatacaggcaagaactgatcgacgcggggttttccgccgaggatgccgaaaccatcgcaagccgcaccgtcatgcgtgcgccccgcgaaaccttccagtccgtcggctcgatggtccagcaagctacggccaagatcgagcgcgacagcgtgcaactggctccccctgccctgcccgcgccatcggccgccgtggagcgttcgcgtcgtctcgaacaggaggcggcaggtttggcgaagtcgatgaccatcgacacgcgaggaactatgacgaccaagaagcgaaaaaccgccggcgaggacctggcaaaacaggtcagcgaggccaagcaggccgcgttgctgaaacacacgaagcagcagatcaaggaaatgcagctttccttgttcgatattgcgccgtggccggacacgatgcgagcgatgccaaacgacacggcccgctctgccctgttcaccacgcgcaacaagaaaatcccgcgcgaggcgctgcaaaacaaggtcattttccacgtcaacaaggacgtgaagatcacctacaccggcgtcgagctgcgggccgacgatgacgaactggtgtggcagcaggtgttggagtacgcgaagcgcacccctatcggcgagccgatcaccttcacgttctacgagctttgccaggacctgggctggtcgatcaatggccggtattacacgaaggccgaggaatgcctgtcgcgcctacaggcgacggcgatgggcttcacgtccgaccgcgttgggcacctggaatcggtgtcgctgctgcaccgcttccgcgtcctggaccgtggcaagaaaacgtcccgttgccaggtcctgatcgacgaggaaatcgtcgtgctgtttgctggcgaccactacacgaaattcatatgggagaagtaccgcaagctgtcgccgacggcccgacggatgttcgactatttcagctcgcaccgggagccgtacccgctcaagctggaaaccttccgcctcatgtgcggatcggattccacccgcgtgaagaagtggcgcgagcaggtcggcgaagcctgcgaagagttgcgaggcagcggcctggtggaacacgcctgggtcaatgatgacctggtgcattgcaaacgctagggccttgtggggtcagttccggctgggggttcagcagccagcgctttactggcatttcaggaacaagcgggcactgctcgacgcacttgcttcgctcagtatcgctcgggacgcacggcgcgctctacgaactgccgataaacagaggattaaaattgacaattgtgattaaggctcagattcgacggcttggagcggccgacgtgcaggatttccgcgagatccgattgtcggccctgaagaaagctccagagatgttcgggtccgtttacgagcacgaggagaaaaagcccatggaggcgttcgctgaacggttgcgagatgccgtggcattcggcgcctacatcgacggcgagatcattgggctgtcggtcttcaaacaggaggacggccccaaggacgctcacaaggcgcatctgtccggcgttttcgtggagcccgaacagcgaggccgaggggtcgccggtatgctgctgcgggcgttgccggcgggtttattgctcgtgatgatcgtccgacagattccaacgggaatctggtggatgcgcatcttcatcctcggcgcacttaatatttcgctattctggagcttgttgtttatttcggtctaccgcctgccgggcggggtcgcggcgacggtaggcgctgtgcagccgctgatggtcgtgttcatctctgccgctctgctaggtagcccgatacgattgatggcggtcctgggggctatttgcggaactgcgggcgtggcgctgttggtgttgacaccaaacgcagcgctagatcctgtcggcgtcgcagcgggcctggcgggggcggtttccatggcgttcggaaccgtgctgacccgcaagtggcaacctcccgtgcctctgctcacctttaccgcctggcaactggcggccggaggacttctgctcgttccagtagctttagtgtttgatccgccaatcccgatgcctacaggaaccaatgttctcggcctggcgtggctcggcctgatcggagcgggtttaacctacttcctttggttccgggggatctcgcgactcgaacctacagttgtttccttactgggctttctcagcccccgagcgcttagtgggaatttgtaccccttatcgaaccgggagcacaggatgacgcctaacaattcattcaagccgacaccgcttcgcggcgcggcttaattcaggagttaaacatcatgagggaagcggtgatcgccgaagtatcgactcaactatcagaggtagttggcgtcatcgagcgccatctcgaaccgacgttgctggccgtacatttgtacggctccgcagtggatggcggcctgaagccacacagtgatattgatttgctggttacggtgaccgtaaggcttgatgaaacaacgcggcgagctttgatcaacgaccttttggaaacttcggcttcccctggagagagcgagattctccgcgctgtagaagtcaccattgttgtgcacgacgacatcattccgtggcgttatccagctaagcgcgaactgcaatttggagaatggcagcgcaatgacattcttgcaggtatcttcgagccagccacgatcgacattgatctggctatcttgctgacaaaagcaagagaacatagcgttgccttggtaggtccagcggcggaggaactctttgatccggttcctgaacaggatctatttgaggcgctaaatgaaaccttaacgctatggaactcgccgcccgactgggctggcgatgagcgaaatgtagtgcttacgttgtcccgcatttggtacagcgcagtaaccggcaaaatcgcgccgaaggatgtcgctgccgactgggcaatggagcgcctgccggcccagtatcagcccgtcatacttgaagctaggcaggcttatcttggacaagaagatcgcttggcctcgcgcgcagatcagttggaagaatttgttcactacgtgaaaggcgagatcaccaaggtagtcggcaaataatgtctaacaattcgttcaagccgacgccgcttcgcggcgcggcttaactcaagcgttagagagctggggaagactatgcgcgatctgttgaaggtggttctaagcctcgtcttgcgatggcatttcgatccattcccattccgcgctcaagatggcttcccctcggcagttcatcagggctaaatcaatctagccgacttgtccggtgaaatgggctgcactccaacagaaacaatcaaacaaacatacacagcgacttattcacacgagctcaaattacaacggtatatatcctgccagtcagcatcatcacaccaaaagttaggcccgaatagtttgaaattagaaagctcgcaattgaggtctacaggccaaattcgctcttagccgtacaatattactcaccggatcctaaccggtttaattaaggcgcgccatgcccgggcaagcggccgcacaagtttgtacaaaaaagcaggcttctagacctaggtggagtcatcacgcagactatctcagcatgtgcgtagcacgcggccgcctcccagtatcattatagtgaaagttttggctctctcgccggtggttttttacctctatttaaaggggttttccacctaaaaattctggtatcattctcactttacttgttactttaatttctcataatctttggttgaaattatcacgcttccgcacacgatatccctacaaatttattatttgttaaacattttcaaaccgcataaaattttatgaagtcccgtctatctttaatgtagtctaacattttcatattgaaatatataatttacttaattttagcgttggtagaaagcataatgatttattcttattcttcttcatataaatgtttaatatacaatataaacaaattctttaccttaagaaggatttcccattttatattttaaaaatatatttatcaaatatttttcaaccacgtaaatctcataataataagttgtttcaaaagtaataaaatttaactccataatttttttattcgactgatcttaaagcaacacccagtgacacaactagccatttttttctttgaataaaaaaatccaattatcattgtattttttttatacaatgaaaatttcaccaaacaatgatttgtggtatttctgaagcaagtcatgttatgcaaaattctataattcccatttgacactacggaagtaactgaagatctgcttttacatgcgagacacatcttctaaagtaattttaataatagttactatattcaagatttcatatatcaaatactcaatattacttctaaaaaattaattagatataattaaaatattacttttttaattttaagtttaattgttgaatttgtgactattgatttattattctactatgtttaaattgttttatagatagtttaaagtaaatataagtaatgtagtagagtgttagagtgttaccctaaaccataaactataagatttatggtggactaattttcatatatttcttattgcttttaccttttcttggtatgtaagtccgtaactggaattactgtgggttgccatgacactctgtggtcttttggttcatgcatggatcttgcgcaagaaaaagacaaagaacaaagaaaaaagacaaaacagagagacaaaacgcaatcacacaaccaactcaaattagtcactggctgatcaagatcgccgcgtccatgtatgtctaaatgccatgcaaagcaacacgtgcttaacatgcactttaaatggctcacccatctcaacccacacacaaacacattgcctttttcttcatcatcaccacaaccacctgtatatattcattctcttccgccacctcaatttcttcacttcaacacacgtcaacctgcatatgcgtgtcatcccatgcccaaatctccatgcatgttccaaccaccttctctcttatataatacctataaatacctctaatatcactcacttctttcatcatccatccatccagagtactactactctactactataataccccaacccaactcatattcaatactactctaggatccacaaccaaaaatggcagcgaggctgcaagagcagaaaggaggtgagatggacacgaggattgcgatcataggcatgagcgccatacttccttgtggaaccacggtgagagagtcatgggagaccataagggctggcattgattgcctgtctgatcttcctgaggatcgtgttgatgtgactgcgtactttgacccagtcaagaccacaaaggacaaaatctactgcaagagaggaggtttcattcctgagtatgactttgatgcgcgtgagtttggtctcaacatgttccagatggaagattctgatgcgaatcagaccatctcacttctcaaggtcaaagaagcacttcaagatgctgggattgatgcacttggaaaggagaagaaaaacataggatgcgtgcttggcattggaggtggacagaagagttcacatgagttctacagcagactcaactatgtggttgtggagaaagtcttgagaaagatggggatgccagaggaagatgtcaaagtggctgtggagaagtacaaagcgaacttcccagaatggagacttgactctttccctggattccttgggaatgtcactgctggcagatgcaccaacacattcaacttggatggcatgaactgcgttgtggatgctgcatgtgcaagctccttgatagcagtcaaggttgcgattgatgaactgctctatggtgactgcgacatgatggtcactggtgcaacctgcacagacaactccattgggatgtacatggctttctcaaagacacctgtgttcagcacggacccaagtgtgagagcgtatgatgagaaaacgaaagggatgctcattggtgagggatcagccatgttggtgctcaaacgttatgcagatgcagtgagggatggtgatgagattcatgctgtgattcgtggttgtgcaagctcaagtgatggcaaagcagctggcatctacactcccacaatcagtggtcaagaggaagccttgagacgtgcatacaatcgtgcctgcgttgaccctgccactgtcactttggttgagggtcatgggactggcactccagttggagataggattgagttgactgcgttgaggaacttgtttgacaaagcgtatggtgaagggaacacagagaaagttgcagttggaagtatcaagtccagtattggtcatttgaaggctgttgctggtcttgctggaatgatcaaggtcatcatggctctcaaacacaagactttgcctggaacgatcaatgtggacaatccacccaatctctatgacaacactcccatcaatgagtcatccctctacatcaacacgatgaacagaccctggttccctccacctggtgttccgagacgtgctggaatatccagctttggctttggaggtgccaactaccatgcagtgttggaagaggctgaaccagagcacacgacagcgtacagactcaacaaacgtccacaaccggtgttgatgatggctgcaactcctgctgcgttgcagagcctttgtgaagctcagctgaaagagtttgaagctgcgatcaaggagaatgagacagtcaagaatactgcctacatcaagtgtgtcaagtttggagaacagttcaagttccctgggagcatacctgcgaccaatgcgagactgggattcttggtcaaagatgcggaggatgcgtgctccacgcttcgtgctatatgtgctcagtttgccaaagatgtgaccaaagaagcgtggaggcttccgagagaaggagtttctttccgtgccaaaggcattgccaccaatggtgctgttgctgcactcttctctggacaaggtgctcagtacacacacatgttcagtgaagttgcgatgaactggcctcagttcagacagtccattgctgcaatggacgctgcacagtccaaggttgctggaagtgacaaagactttgaaagagtctctcaagtcctgtacccaaggaaaccgtacgaacgtgagccagaacaagatcacaagaaaatctcactcacagcatacagccagccgtcaaccctggcatgtgctcttggtgcctttgagattttcaaggaagctggattcactccagactttgcagctggacacagcttgggtgagtttgctgcgctctatgcagctggttgtgttgacagagatgagttgtttgaacttgtttgcagaagggcaaggatcatgggaggcaaagatgcacctgccacacccaaaggttgcatggcagctgtcataggacccaacgcagagaacatcaaggttcaagctgccaacgtctggcttggaaactcaaactctccgtctcagactgtcattactgggtctgttgaagggattcaagctgaaagtgccagattgcagaaggaagggttcagagttgtgcctcttgcttgtgagtctgccttccattctccacagatggaaaatgccagctcagctttcaaagatgtcatatccaaggtttccttccgtacacccaaagcagaaacaaagctcttcagcaatgtttctggagagacctatccgacggatgccagagagatgctcactcaacacatgacctcatctgtgaagttcctgacccaagtgaggaacatgcaccaagctggtgcgagaatctttgttgagtttggaccgaaacaagttctcagcaaacttgtttctgaaaccctcaaagatgacccgtctgttgtcacagtgtctgtgaacccagcttctggcacggactctgacatacagttgagggatgctgcagttcagctggttgtggctggtgtcaatcttcaagggtttgacaagtgggatgctcctgatgccacgaggatgcaagccatcaagaaaaagagaaccacactcagactttcagctgccacctatgtcagtgacaagaccaagaaagtgagggatgctgccatgaacgacggaagatgtgtcacatacctcaagggtgctgcaccactcatcaaggctcctgaacctgtggttgacgaagctgccaagagggaggctgaaaggcttcagaaggagcttcaagacgctcagaggcagcttgacgacgccaaacgtgcagctgcagaagccaactccaaacttgctgctgccaaggaggaagccaagactgctgcagcttcagccaagcctgcagttgacactgctgttgtggagaaacatcgtgccatcctcaagtccatgctggctgagctggatggttatggaagtgttgatgcttcttcccttcagcaacagcaacagcaacagactgctccggcgcctgttaaagccgctgcccctgccgctcccgttgcaagtgctcctgctcccgccgtgtccaacgagttgcttgagaaagctgagacagttgtgatggaggttctcgctgccaagactggatacgaaacagacatgattgaggcggacatggagcttgagactgagttgggaattgacagcatcaagagggttgaaattctttctgaagtccaagctatgcttaacgttgaggcgaaagatgttgatgctctctctaggacgagaacagtgggtgaagttgtcaacgctatgaaggcagaaatcgctggttcttccgctccggcgccggcagctgccgcacctgcaccggctaaagcggctccagctgcagctgcaccagctgtttctaatgagctgctcgaaaaggcagaaactgttgtgatggaagtccttgctgccaaaactggctacgaaactgacatgatagaatcagacatggagcttgagacggagcttggaattgattccatcaagcgtgtggaaatcctcagtgaagtccaagccatgctcaatgtggaagctaaggatgtggatgctctctcaaggaccagaactgtcggtgaggttgtcaatgccatgaaggctgagatagctggaggctccgctcctgcgccggccgctgccgctcctggtcccgctgccgcggctccagctccagctgcagccgctccggccgtctcaaacgaactccttgaaaaagctgagaccgtcgtgatggaggtcttggcagctaaaaccggctatgagactgacatgattgagtctgacatggaattggagacagaacttgggatagacagcatcaaacgtgttgaaatcctcagtgaggtccaagctatgctgaacgtggaagcgaaggatgttgatgctctgtccagaacgaggaccgttggtgaggttgtggatgccatgaaggctgaaattgctggagggtctgcgcccgcgccagctgcagccgctcctgcacccgcagccgcggcacctgctccagctgcacctgcacctgccgtttcttcagaactcttggagaaggctgagacggttgtgatggaggttttggctgcaaagactggctatgagaccgacatgattgaatctgatatggaattggagacagagcttgggatcgattccatcaaaagagtggagatcctgagtgaagtccaagccatgctcaatgttgaagctaaggatgttgatgcactttcaagaacaaggacagtgggtgaggttgtggatgccatgaaggcggagattgctggagggagcgcgcctgcgccagctgccgcggcacctgcaccggcagccgcagctccagctccagctgcaccagcaccggccgcgcccgcgccagctgtttcatccgaactcctggaaaaggccgagacggttgtgatggaggtgctcgcagctaagactggttacgagaccgacatgattgaaagtgacatggagcttgaaaccgagttgggaatagatagcatcaaacgtgttgaaatcttgtctgaggtccaagctatgttgaacgtggaggcaaaagatgtcgatgcgctttcaagaaccagaacagtcggtgaggtcgtggacgccatgaaggctgaaattgccggaagctctgctagtgcgccagctgcagccgcacctgcacctgctgccgcggcacctgctccagctgcagccgctcctgccgtcagcaatgagttgctggagaaagccgaaacagttgtgatggaagtccttgctgcaaaaactggttacgaaacggacatgattgagtcagacatggaattggagaccgaacttggaatagattccatcaagagagtggagatcctctctgaggtgcaagccatgctcaacgttgaggctaaagatgttgatgcactcagtaggacaagaactgtgggggaagttgtcgatgcgatgaaggctgagattgctggaggctctgctcctgcgccggcagctgccgcacctgcacccgcagccgcggcaccagctgtcagcaacgaattgcttgagaaggctgaaacagttgtcatggaagtgctggctgcaaaaaccggctatgagactgacatgattgagtctgacatggaacttgagacggaattgggcattgacagcatcaagcgtgttgagatcctcagtgaagtccaagcaatgctcaatgtggaggctaaggatgtggatgccctctcaaggaccagaacagttggtgaggtcgttgatgcgatgaaggcggagatcgctggaagttccgcgcctgcgccagctgcagccgctcctgcacccgcagccgcggcaccggctccagctgcagccgcaccggccgtctcctcagaactcctggaaaaggctgagacagttgtgatggaagtccttgctgcgaaaactggctatgagaccgacatgattgaatctgacatggaactggagaccgagcttggaattgactccatcaaacgtgttgaaatcctctctgaggttcaagcgatgttgaatgtggaggccaaagatgttgatgctctttccagaacaaggacggtgggagaggtggttgatgccatgaaggctgagatagctgggggttctgctcctgcgccagctgcagccgctcctgctcccgctgccgcggcaccagctgtcagcaacgaactccttgaaaaagctgaaactgttgtgatggaggttttggctgcaaagactggatacgagactgacatgatagagtcagacatggagttggaaacagagcttgggattgatagcatcaagcgtgtggaaatcctttctgaggttcaagccatgctgaacgttgaggccaaagatgtcgatgctttgtcaaggaccagaacggttggagaagtggtcgatgccatgaaggctgagatagctggtggatcagcccctgctccggctgcagccgctcctgcaagtgccggtgctgcaccagctgtgaagattgattcagttcatggtgctgactgtgacgatttgtcactgatgcacgcaaaggtggttgacatcagaaggccagatgaactgattctggaaagaccggagaaccgtccagttcttgtcgttgacgatggctcagagttgacacttgctcttgtgagggtgttgggagcctgtgcagttgtcttgacctttgagggattgcagttggctcagagagctggtgcagctgccattcgtcatgttctggctaaggacctttcagcagaatcagctgagaaggccatcaaagaggctgagcaaagatttggagcgttgggaggcttcataagccagcaagcagaaaggtttgaaccagctgagatactgggtttcacactcatgtgtgcgaagtttgccaaagcctctctctgcactgctgtggctggaggtcgtcctgccttcatcggtgtggctaggcttgacggcagacttggattcacctctcaaggcacttctgacgcactcaagagagcacagcgtggagcgatctttggactctgcaagacaatagggttggagtggtcagaatctgatgtgttcagccgtggtgtggacattgctcaagggatgcacccagaagatgctgcagttgccatagttagggagatggcgtgtgctgacatcagaatcagagaggttgggattggagcaaaccagcaaagatgcacaatcagagctgccaagttggagactgggaaccctcagagacagatagcgaaagacgatgtgcttctggtttctggaggtgctcgtgggatcacacctctttgcatccgtgagatcacgcgtcagattgctggaggcaagtacattctgttgggtcgtagcaaagtttctgcgtctgaaccagcatggtgtgctggcatcactgatgagaaggctgtgcagaaagctgccacccaagagttgaagagggccttcagtgctggtgaaggacccaaacccactccaagggctgtcacgaaacttgtgggatctgttcttggtgctcgtgaagtgagaagctccattgctgccattgaagctctgggtggcaaagcgatctacagctcttgtgatgtgaactctgctgcagatgttgccaaagcagttagggatgcagagtcccagcttggtgccagagttagtggaatcgttcacgcttctggtgtgctccgtgatcgtctcatagagaagaaactccctgacgagtttgatgctgtctttgggaccaaagtcactgggttggagaatcttctggctgcagttgatcgtgccaacctcaaacacatggttctcttcagctcccttgctggtttccacggcaatgttggtcagtctgactatgcgatggcaaacgaagctctcaacaagatgggtttggaacttgcgaaggatgtcagtgtcaagtccatctgctttggtccctgggatggtgggatggtgacacctcaactcaagaaacagtttcaagaaatgggagttcagatcattcctcgtgaaggaggtgctgatacagttgcgaggattgtgttgggatcaagtcctgctgagatccttgttggaaactggaggacaccatccaagaaagttggaagtgacacgatcaccctgcatagaaagatcagtgccaagtccaatcccttcttggaggatcatgtcatacaaggcagaagggtgttgccaatgacccttgctattgggagccttgctgagacctgccttggactcttccctggctactctctctgggccatagatgacgcacagctcttcaaaggtgtcactgttgatggagacgtcaactgtgaagtgaccctcacaccgtccactgctccgagtgggagggtgaatgtccaagcgacgctcaagacgttctcaagtggaaaacttgttccagcctacagagctgtcatagtgttgtccaaccaaggtgctccacctgccaatgcaaccatgcagcctccgagccttgatgcagatcctgctttgcaagggtcagtctatgatggcaagactctctttcatggtcctgcgttcagaggcattgatgacgttctcagctgcaccaagagccagcttgttgccaagtgttctgctgttcctggatcagatgcagccagaggagagtttgcaactgacactgatgcacatgatccctttgtcaatgatcttgcctttcaagcaatgttggtctgggtgaggagaacgctgggacaagctgcactcccgaactccattcagaggatagtccaacacagaccggtcccacaagacaaacccttctacatcaccctcagatccaatcagagtggtggacatagccagcacaaacatgcacttcagttccacaacgaacaaggtgatctcttcattgatgttcaagcctctgtcattgcgacagactcacttgcgttctgagtagttagcttaatcacttaggtcaccagtatgaactaaaatgcatgtaggtgtaagagctcatggagagcatggaatattgtatccgaccatgtaacagtataataactgagctccatctcacttcttctatgaataaacaaaggatgttatgatatattaacactctatctatgcaccttattgttctatgataaatttcctcttattattataaatcatctgaatcgtgacggcttatggaatgcttcaaatagtacaaaaacaaatgtgtactataagactttctaaacaattctaactttagcattgtgaacgagacataagtgttaagaagacataacaattataatggaagaagtttgtctccatttatatattatatattacccacttatgtattatattaggatgttaaggagacataacaattataaagagagaagtttgtatccatttatatattatatactacccatttatatattatacttatccacttatttaatgtctttataaggtttgatccatgatatttctaatattttagttgatatgtatatgaaaaggtactatttgaactctcttactctgtataaaggttggatcatccttaaagtgggtctatttaattttattgcttcttacagataaaaaaaaaattatgagttggtttgataaaatattgaaggatttaaaataataataaataataaataacatataatatatgtatataaatttattataatataacatttatctataaaaaagtaaatattgtcataaatctatacaatcgtttagccttgctggaacgaatctcaattatttaaacgagagtaaacatatttgactttttggttatttaacaaattattatttaacactatatgaaattttttttttttatcagcaaagaataaaattaaattaagaaggacaatggtgtcccaatccttatacaaccaacttccacaagaaagtcaagtcagagacaacaaaaaaacaagcaaaggaaattttttaatttgagttgtcttgtttgctgcataatttatgcagtaaaacactacacataacccttttagcagtagagcaatggttgaccgtgtgcttagcttcttttattttatttttttatcagcaaagaataaataaaataaaatgagacacttcagggatgtttcaacccttatacaaaaccccaaaaacaagtttcctagcaccctaccaacgaattcgcggccgcttaattaagatgagtgatactcaggactcaggactcactctgctgatcactagtgctagcctcgaggtcgacacaactttgtatacaaaagttgtctagacctaggctcagcaactcatccagtcaagttcgagtcagtgagttgggcggccgcagcttatagtaaagatttttttgttaataaaatgaaagttaatatttatggatttatttgaacatatttacaagtttttgttaataaatttatttacagaagtgttaaatttgaaaatgtgttaaatgagagttaatatttatggatataatattactttatttaaaaataaaatgaatttatattaaaatatgatttggtaaaagatattataaagaggaacttggatgagaaagacgacgatgggcaaaagttgcatggcacaccgcttttgttcagtaacatctgcactgtggcgcctttttcacactcaccatgcatgctgccacgtcagctttcacactatgacaccactggccatacacgttgccacctcagctttctcctcttctcactatgacacgactggccatgcatgcatgcatgctgccacctcagctcccgcctcttcacccgtgtctttctctcatgtcgcagtgctgcgtgccaacctcttctctctataaatagagagaagagaatgatggttaaactcaaaccaaaacaagaaaacatacacaaatagcaaaacggatccacaaccaaaaatggctgcaaggaacgtgagtgcggctcatgagatgcatgacgagaagaggatagctgttgtgggcatggctgttcagtatgctggatgcaaaacgaaagacgagttctgggaagttctcatgaatggaaaagttgagagcaaagtgatcagcgacaaacgtcttggttcaaattaccgtgctgaacactacaaagctgaaaggagcaagtatgctgacaccttctgcaatgagacatatggaactcttgatgagaacgaaatagacaatgagcatgaactccttttgaaccttgccaaacaagccttggctgaaacatctgtcaaagattcaacaagatgtggcatagtttctggatgcctcagcttcccgatggacaacctccaaggtgaactcttgaatgtgtaccagaaccatgttgagaagaaacttggtgccagagttttcaaagatgcctctcactggtcagaaagagaacagtccaacaaaccagaggctggtgacagaagaatcttcatggaccctgcttcctttgttgctgaggaactcaatcttggcgctctccactactctgttgatgctgcctgtgccactgcgctctatgtgctcagactggcgcaagatcacttggtctctggtgcagctgatgtgatgctttgtggtgcaacatgcctgccggagccgtttttcatactctctgggttctcaaccttccaagccatgcctgttggaacgggtcagaatgtgtccatgccgctgcacaaagattctcaaggattgacccctggtgaaggaggttccatcatggtcctcaaacgtttggatgacgcaatcagagatggagatcacatctatggaacacttttgggagccaatgtcagcaacagtggcactggtctgccacttaaaccccttttgccgtcagagaaaaagtgcctcatggacacctacacacgtatcaatgtgcatccccacaagattcagtatgttgaatgccatgcaactgggactccacaaggtgatcgtgtggaaattgatgctgtgaaggcttgctttgaaggcaaagtcccacgttttggaaccacaaaagggaactttggacacacattggtggcagctgggtttgctggcatgtgcaaagtgcttctctccatgaagcacgggatcattccacccactccgggaatagatgacgaaacgaagatggaccctctggttgtctctggtgaggccattccctggccagaaacgaatggagaaccgaagcgtgctggtctctcagcgtttggatttggtgggaccaatgctcatgctgtctttgaggaacatgacccaagcaatgctgcatgcactggccatgactccatttctgctctctctgcacgttgtggtggtgagtcaaacatgagaatagcaatcactgggatggatgccacttttggtgctttgaaaggattggatgcttttgaaagggccatctacactggtgctcatggtgctataccactcccagaaaagagatggagattcctggggaaagacaaggacttccttgatctttgtggagtcaaagcaacaccgcatggctgttacattgaagatgttgaagttgatttccagaggctgaggactccaatgactcctgaagatatgctcttgcctcaacagcttctggctgtcaccacaattgatagggccatattggactctggcatgaagaaaggtggaaatgtggctgtctttgtggggttggggaccgatcttgaactctaccgtcaccgtgcaagggttgctctcaaggagagagtgaggcctgaagccagcaagaaactcaatgacatgatgcagtacatcaatgattgtgggacaagcacttcttacaccagctacataggcaacttggttgcaacaagggtcagttcacaatggggcttcacgggaccttccttcacaatcacagaaggcaacaattctgtgtacagatgtgctgaacttggcaaatacctcttggaaacgggagaggttgatggggttgtggttgcgggtgttgatctctgtgggagtgctgagaacctttacgtcaagtcaaggcgtttcaaggtgtctacatctgacaccccgagagccagctttgatgcagctgctgatggttactttgttggagagggctgtggtgcatttgtgctcaagcgtgagacaagctgcaccaaggatgacagaatctatgcttgcatggatgccatagttcctggaaatgttccatctgcatgtttgagagaggcattggatcaagccagagtcaagcctggagacatcgagatgttggagctttctgctgattcagcgaggcatttgaaggacccgtctgttctcccaaaggaactcactgctgaggaagagattggcggacttcagacgattcttcgtgacgatgacaagctcccaaggaatgttgcaactggaagtgtcaaggccactgttggtgacactggttatgcttctggtgctgccagtttgattaaggctgcgctttgcatctacaaccgttacctgcccagcaatggagatgactgggatgaacctgcacctgaagcaccctgggacagcacactctttgcgtgccagacctcaagagcttggttgaagaaccctggtgagagacgttatgcggctgtttccggagtcagtgaaaccagaagttgctacagtgtgctgctttctgaagcagagggacactacgagagagagaacagaatcagtttggatgaggaagcacccaagctcattgtgttgagagcagactcccatgaagagattcttggaagattggacaagataagggaaaggttcttgcagcccacgggtgctgcacccagagagtctgaattgaaggcgcaagcccgtaggatctttcttgaactccttggtgagacccttgcccaagatgcagcttcatctggaagtcagaagccccttgctctcagcttggtctccactccatccaagctccagagagaggtggaacttgcggcaaaaggcattccgagatgtctcaagatgagacgtgattggagttcccctgctggaagcagatatgcgcctgagcctttggccagtgacagagttgccttcatgtatggagaaggaaggagcccttactatggcatcacacaagacattcataggatttggcctgaacttcatgaggtcatcaatgagaaaacaaaccgtctctgggctgaaggtgacagatgggtcatgccaagggccagcttcaagagtgagcttgagtcacaacagcaagagtttgacagaaacatgattgaaatgttccgtcttggaatcctcacctcaattgccttcacaaacctggcgagagatgttctcaacatcacgcccaaagcagcctttggactcagtttgggagagatttccatgatctttgctttctccaagaaaaacggtttgataagcgatcagttgacaaaggatttgagagagtcagatgtctggaacaaagctctggctgttgagttcaatgcgctcagagaagcctggggcattccacagtctgtcccaaaagatgagttctggcaaggttacatagtgaggggaacgaaacaagacatagaagcagccatagcaccagactcaaagtatgtgaggttgaccatcatcaatgatgccaacactgctctcatcagtggaaagcctgatgcatgcaaagctgcgattgctcgtcttggtggcaacatccctgcgcttccagtcactcaaggcatgtgtgggcattgcccagaggtgggaccttacaccaaggacatcgcaaagatccacgccaaccttgagttccctgtggttgatggtcttgatctctggactaccataaaccagaagaggcttgtgccaagagccacgggtgccaaagatgaatgggctccttcatcctttggggagtatgctggacagctctatgagaaacaagccaacttccctcagatagttgaaaccatctacaagcagaactatgatgtgtttgttgaagttgggccaaacaatcacagaagcacagcagtgagaaccacgcttggaccacagagaaaccaccttgctggtgccatagacaagcagaacgaggatgcttggacgacaatagtcaagctcgtggcttcattgaaggctcaccttgttcctggagtgaccatcagtccgctctaccactccaagctcgttgcagaggctgaggcttgttatgctgcgctctgtaaaggtgagaaacccaagaaaaacaagtttgtgagaaagattcagttgaatggcagattcaacagcaaggcagaccccatctcctcagcagaccttgcatccttcccacctgcggaccctgcgattgaagctgccatctcttcaaggatcatgaagcctgtggctccgaaattctatgcgcgtctcaacattgatgagcaagatgagaccagagatccgatcttgaacaaggacaatgcgccttccagctccagctcttccagcagttcctcttccagcagttcatctccgtctcctgctccttcagctccagttcagaagaaagctgccccagctgcggagacaaaagctgttgccagtgctgatgcacttcgtagtgccctgcttgatcttgactccatgcttgcgctcagctctgcaagtgcttctggcaaccttgttgagactgcgccatctgatgccagtgtcattgtccctccgtgcaacattgctgatcttggcagcagagctttcatgaaaacttatggtgtttctgcgcctctgtacaccggtgcaatggccaagggaattgcctctgcggacttggtgatcgcagctggaaggcaaggaatccttgcgtcatttggtgctggaggccttccaatgcaagttgtgcgtgagtccattgaaaagattcaagctgccctgcccaatggaccatatgctgtcaacctcatccattctccttttgacagcaaccttgagaagggaaatgttgatctcttcttggaaaagggtgtcacttttgttgaggcttcagccttcatgacgttgacaccgcaagttgtcagatacagagcggctgggttgacgaggaatgcagatgggtcagtcaacataaggaacagaatcattgggaaagtctccagaactgagctggctgaaatgttcatgcgtcctgcacctgagcatcttttgcagaagctcattgcttctggggagatcaatcaagaacaagctgagttggccagacgtgttcctgtggctgatgacattgcggttgaagctgattctggtggacacactgacaaccgtccaatccatgtcattctgcctctgattatcaacctgagggataggcttcacagagagtgtggatacccagcaaacctgagggttcgtgttggtgctgggggtggcattgggtgtccccaagctgcgctggcaactttcaacatgggtgcctctttcattgtcactggaacagtgaaccaagttgccaaacaatctgggacgtgtgacaatgtgaggaaacagcttgcgaaagcaacttactcagatgtttgcatggcaccggcagctgacatgtttgaggaaggtgtgaaacttcaagttttgaagaaaggaacaatgttcccttcaagagccaacaaactctatgagttgttctgcaagtatgattcttttgagtccatgcctccagcagagcttgcgagggttgagaaaagaatcttcagtcgtgcattggaagaggtctgggatgagaccaagaacttctacatcaaccgtctccacaacccagagaagatacagagggctgagagggaccccaaactgaagatgtcactgtgtttcagatggtatctgtccctggcttcaaggtgggccaacactggagcttctgacagagtcatggactaccaagtttggtgtggtcctgccattggttcattcaatgatttcatcaaaggaacttaccttgatccggcagtggcaaatgagtacccgtgtgttgtgcagatcaacaaacagattcttagaggagcgtgcttcttgaggcgtcttgaaatactgagaaatgcaaggctttcagatggtgcagctgcacttgtggcgagcattgatgacacatatgtccctgctgagaagctgtgagtagttagcttaatcacttaggtcacccagtccaagcccggcctagcacgatgatcatgagtgttgctattgatgtatgttaatactatacacagtcatcgtgtgtgttttataaaactgtaagcttaggatgtttgaggctaatgtaattagcactacaccgtaataaatgagaggtttactttatgttttaataatgttcttacccttgctgctctctaaactgtaatggcgtacggttagctaaactaaagtaaaaatcgattcgcttgagtaaaattagtgaccgggaaagatcatcgactactactgctcagagatgtaatcggtaattaagacttcaagctcaataattaattaggagtaaatctggcttcgaatttttaaattgtcaacttccaaagaaggattggcaagactcaatctcaattgcccaacaaacatatggctctttacaaatttggaatctctttttgatggcaagaacgtcgtaattcctctgtcgatctcatgtaattaccaaactcatctacttattactttctttatatgcacttactgatgcggccgcttaattaatctgacctgaccactagacctgagtgagtacagatgtgctactagtgctagcctcgaggtcgaccaacttttctatacaaagttgtctagacctaggactaggcactgagtgactcactgacctgactgagtgactggcggccgcagcttatagtaaagatttttttgttaataaaatgaaagttaatatttatggatttatttgaacatatttacaagtttttgttaataaatttatttacagaagtgttaaatttgaaaatgtgttaaatgagagttaatatttatggatataatattactttatttaaaaataaaatgaatttatattaaaatatgatttggtaaaagatattataaagaggaacttggatgagaaagacgacgatgggcaaaagttgcatggcacaccgcttttgttcagtaacatctgcactgtggcgcctttttcacactcaccatgcatgctgccacgtcagctttcacactatgacaccactggccatacacgttgccacctcagctttctcctcttctcactatgacacgactggccatgcatgcatgcatgctgccacctcagctcccgcctcttcacccgtgtctttctctcatgtcgcagtgctgcgtgccaacctcttctctctataaatagagagaagagaatgatggttaaactcaaaccaaaacaagaaaacatacacaaatagcaaaacggatccacaaccaaaaatggcgcttcgtgtcaagaccaacaagaagccatgttgggagatgaccaaggaggaactgacctctggcaaaactgaggtgttcaactatgaggaactcctggagtttgcagagggtgacatagctaaggtttttggtccggagtttgctgtcatagacaagtaccccagaagggtgaggctgcctgctcgtgaatacctgcttgtgacaagggtcacactcatggatgccgaggtcaacaactacagagttggtgccagaatggtcactgagtatgatcttccagtgaatggcgaattgtctgagggaggtgattgtccctgggcagttctggttgagagtggacagtgcgatttgatgctgatatcatacatgggaattgatttccagaaccaaggtgacagagtttaccgtctgctcaacaccacgttgacattctatggggttgcccatgagggagagacccttgagtatgacatcagagtgaccggttttgccaaacgtttggatggtggcatctccatgttcttctttgagtatgactgctatgtcaatgggaggcttctcattgagatgagagatggctgtgctggcttcttcacaaatgaggagcttgatgcgggaaagggtgtggtgttcacaagaggggatttggctgccagagctaagattccaaagcaagatgtttctccctatgctgtcgctccctgccttcacaaaacaaaactcaacgaaaaggagatgcagaccttggttgacaaagattgggcttccgtttttggctcaaagaatggcatgccggagatcaactacaaactctgcgcacgtaagatgctcatgattgatagagtcaccagcattgaccataagggaggtgtgtacggtttgggtcagttggttggtgagaaaatcttggagagggaccattggtacttcccatgccattttgttaaggatcaagtcatggctggatctcttgtcagcgacggttgttcacaaatgctcaagatgtacatgatctggctcggtttgcaccttaccaccggaccatttgacttcagacccgtcaacggacacccgaacaaagttaggtgtaggggtcagatatctcctcataagggaaagttggtctacgtcatggagatcaaagagatgggattcgacgaggataacgatccgtacgccattgctgacgtcaacatcattgacgttgatttcgaaaagggtcaagatttcagccttgatagaatcagcgactacggaaagggggatcttaacaaaaagatcgtcgtggacttcaagggcattgctctcaagatgcagaagagatccacgaacaagaacccctccaaagttcagcccgtttttgctaacggtgcagccactgtgggaccggaagcgtccaaggccagctctggtgccagtgctagtgcttctgctgcccctgcgaagcctgctttctcagcagatgttcttgcgccaaagccagttgcacttcctgaacatatcctcaagggtgacgctctcgctccgaaagaaatgtcctggcatcccatgtcaaaacttcctggcaacccgacgccgttcttctcccctagttcttaccctccgagggcaatttgcttcatccctttccctggcaacccacttgacaacaattgcaaagctggagaaatgcctctgaactggtacaacatgtcagagttcatgtgtggaaaagttagcaactgcttgggaccagagttcgcaagatttgataagtcaaatacgagcagaagccctgcttttgatttggctcttgtgactagagttgttgaagtcacaaacatggaacatggcaagttcctgaatgttgattgcaatcccagcaaaggcacaatggtgggggagtttgactgtcctcaagatgcgtggttctttgatggttcttgcaatgatgggcacatgccttattccatcatcatggaaatcggacttcagacatccggtgttctcaccagtgtgttgaaagcaccactgacgatggacaaagatgacattctctttaggaaccttgatgcaagtgctgaaatggtgaggccagatgtggatgtgagggggaaaaccataaggaatgtgaccaagtgcactggatatgcaatgttgggaaagatggggattcacagattcacgtttgagttgtctgttgatggcgtggttttctacaaaggaagcacttcctttggatggttcactccagaggtgtttgctcagcaagctggacttgacaatgggaaaaagacggagccttggtgcaaaactaacaacacgagtgtgagaagagttgaaatcgcatcagccaaaggcaaagaacagctgactgagaaacttccagatgcaactaatgctcaagttctcagaaggtcagaacagtgtgagtatttggattacctcaacattgctcctgattctgggctgcatgggaaaggatatgcgcatggacacaaagatgttaacccacaagactggttcttctcttgtcacttttggtttgatcctgtgatgcctggatctttgggaattgagtcaatgttccagctcattgaggcatttgcggtggaccagaacataccgggagaatacaatgtgagcaatccgacctttgcccatgcccctggaaaaacggcgtggaagtaccgtggtcaattgacaccaaagaaccgtgcgatggactgtgaggtgcacatagtttcaatcacagcctctcctgaaaatggaggctacgttgacatagtggcagatggagcactttgggttgatggtctccgtgtgtatgaagccaaagaactcagagttcgtgttgtcagtgcaaaacctcaagccattccggatgttcaacaacagccacccagcgcaaaagcggaccctgggaaaactggagttgcactcagtccgactcagttgagagatgtcctgcttgaagtggacaatccattgtatcttggtgttgaaaactccaatttggtgcagtttgaatccaaacctgcaacttcttcaaggattgtcagtatcaaaccatgctccataagtgatcttggtgacaagtccttcatggaaacgtacaatgtgtcagcacctctgtacactggagcaatggccaagggaattgcgtctgcggaccttgtcattgctgctgggaagaggaagatattgggttcttttggagcgggtgggcttccaatgcaccatgtgagggcagctttggagaagatacaagcggctctgcctcaaggaccatatgctgtgaacctcattcattcaccttttgacagcaacttggaaaaggggaatgttgatctcttcctcgaaaagggcgttactgtggtggaggcttctgcattcatgaccctcactccccaagttgttcgttaccgtgcagccggactctcaaggaacgctgatgggagtgtcaacatcagaaaccgtatcattggaaaagtgtccagaacagaactcgccgaaatgttcatcagaccggctccggaacacctccttgagaaactcatagcttctggtgagataacacaagaacaagccgaacttgcccgtcgtgttcctgtcgcagacgacatcgctgttgaagctgattctggtggtcacactgacaaccgtcccatccacgtcatcttgcctttgatcatcaaccttaggaacagactgcacagagagtgtggttatcctgcgcaccttagagtcagagttggagctggaggcggtgttggctgcccacaagctgctgcggctgccctcacaatgggagctgccttcatagtgactgggactgtcaatcaagttgctaaacagtccgggacatgtgacaacgtgagaaaacaactcagtcaagccacctacagtgacatttgcatggctccagcagctgatatgtttgaggaaggtgtgaaactccaagttctcaagaagggaacaatgttcccatcaagagctaacaaattgtacgaactcttttgcaagtacgactctttcgattcaatgcctcctgctgaacttgaaaggatcgagaagaggatcttcaagagggcacttcaagaggtctgggaagagaccaaggacttttacatcaatggtttgaagaatccagagaagatacagagagcggaacatgaccccaaactcaagatgtctttgtgtttcagatggtatcttggtcttgcatcacgttgggccaacatgggtgctcctgatcgtgtcatggactatcaagtctggtgtggtccagccattggagccttcaatgacttcatcaaaggaacatatcttgatcctgctgtctctaatgagtacccatgtgttgtccagatcaaccttcagattttgcgtggtgcatgttacctgaggcgtcttaatgctctgagaaatgatccgaggattgatcttgagactgaagatgctgcctttgtctatgagccaacgaatgcgctttgagtagttagcttaatcacttaggtcacccagtccaagcccggcctagcacgatgatcatgagtgttgctattgatgtatgttaatactatacacagtcatcgtgtgtgttttataaaactgtaagcttaggatgtttgaggctaatgtaattagcactacaccgtaataaatgagaggtttactttatgttttaataatgttcttacccttgctgctctctaaactgtaatggcgtacggttagctaaactaaagtaaaaatcgattcgcttgagtaaaattagtgaccgggaaagatcatcgactactactgctcagagatgtaatcggtaattaagacttcaagctcaataattaattaggagtaaatctggcttcgaatttttaaattgtcaacttccaaagaaggattggcaagactcaatctcaattgcccaacaaacatatggctctttacaaatttggaatctctttttgatggcaagaacgtcgtaattcctctgtcgatctcatgtaattaccaaactcatctacttattactttctttatatgcacttactgatgcggccgcttaattaatcacgagtggatgactgtcacgactgactcatgactgactactagtgctagcctcgaggtcgacacaactttgtataataaagttgtctagacctaggcgagtcatgagtcgtgacatgacgtcatgctcatcagactgcggccgcagcttatagtaaagatttttttgttaataaaatgaaagttaatatttatggatttatttgaacatatttacaagtttttgttaataaatttatttacagaagtgttaaatttgaaaatgtgttaaatgagagttaatatttatggatataatattactttatttaaaaataaaatgaatttatattaaaatatgatttggtaaaagatattataaagaggaacttggatgagaaagacgacgatgggcaaaagttgcatggcacaccgcttttgttcagtaacatctgcactgtggcgcctttttcacactcaccatgcatgctgccacgtcagctttcacactatgacaccactggccatacacgttgccacctcagctttctcctcttctcactatgacacgactggccatgcatgcatgcatgctgccacctcagctcccgcctcttcacccgtgtctttctctcatgtcgcagtgctgcgtgccaacctcttctctctataaatagagagaagagaatgatggttaaactcaaaccaaaacaagaaaacatacacaaatagcaaaacggatccacaaccaaaaatgcccactccagatgccactgcgcctctcaacaagccgtcagactatgctgtgtaccacgaagaggatggtcctttctggactgctgattcctctggtgtcagcagagtgaacttctctgaaactggtgtgggatctgaaggtgtcattcctgcgctcacactgattgatgtgtttgagcgtgcggtcaaacgtggtggcaataggattgcattcagaacagagaacatgccaaccttgaggcgtggagaagaggctcctgatgctttgccgctcaaagattggaagtcctggtcttggaaacagtacaaagctgatgttcacagaattgcgagggctctgatggatttgggagttgagcagcacgatgcggtctccatctttggcttcaactcaccagaatggttcctcagtgctgtcggtgcagttcatgctggtgccaagatcgctggaatctacccttcagacactcctgctcaagtgcagtacaaagccttccactctgacactgctgttgcagttgtggagaacgaacagtgcttcaagaaattcgcagaggtggttgaggatctcccttacctcaaagccattgtttgttgggattatgaagccacagacatcacaagggaagatggttcagtggttgaagtcctgacctttgctgagttcctgaagagaggtgacactgtggaagcagctgcacttgatgagagaatcagcaagattgagcccaccatgtgtgctgccctgatctacaccagtggcacaactgggagacccaaagctgtcatgatctcccatgacaaccttgtctttgaagcatctgctgtggtcccgaacttgggaggggcatgcacgaccactgctgaggaaaggattctttcctaccttcctttgtctcatgttgctggaatgatggttgacatcattgctccaatcatagcgacagcgttccacaaaggaaggatctgtgtttgttttgccagaccgtatgatttgagaactggaacccttgggcaaagactcaatgcagtggagccaaccatattccttggtgtgccacgtgtgtgggaaaagatccaagagaaattgatggctgttggtgccaaaaccactggtctcaagaagaaactcagcacggcagccaagaaacgtgggcttgaatttcaagaggaacaacagatagggagaagtggtgccaaccctggctttggaccgcttggaatctacaagaaacttttgggcctcatcaaaggaaagttggggctgaccaaatgcaagtttgcctttgctggcgcagctccaatgacccgtgaaacccttcagtactttggagcgctgaacatcaacatcaatgaggtctatggaatgtctgaatgcagtggggctgccacctggtcaactgacaaagctcatgagtggggcactgttggctatgagatgccctcctgtgaagtcagagtgttcaagattgcggaggatggcaccaagacagagtgcccaagagctgctgacatcatgcatgccacagaagaggaacaaggtgaagtttgcttccgtggaaggaacatcatgatgggatacttggccaacccgaaacttggtgatgaccatgttgctgagattgaagagaagaatgcagctgccatagatagcgaagggtggcttcactctggtgacaagggagcaatttccacaaggggaatgctcaagataacgggcagatacaaggagcttatcataggtgctggtggggagaatgtggctcctgttcccattgaagatgccatcaaggcgaggatgccttttgtttcaaatgcaatgatggttggagacaagaggaagttcatggctgtccttctgactttgaaaacggttggagcaactggagagcttcctggcacaaacaagctcatgggagcagctgcggactatggtgagaccattgaggatgcctgtgacaatgaggcgctcattgaagagataacgcagcaactcaaagagataggtgacgatggagatgtcacgccaagcaatgcagcccgtatacaaaagttcacgattttgccactcgacttcagtgtctccacagatgaactgacagcaacgttgaaattgaagagaagtgtggttgcagacaagtatgaggacatcatagaggctttctatgagagcaagtctgtctttgtgccttactcaacagttggagcttatgcaacgggtggaccagttgatgactctgttgtggatggatcattcaaaggtgactttagcatgattggggatgacgatccggatcttcagaatgtggatgtccttgaagcaattgatgaggacaactgagtagttagcttaatcacttaggtcacccagtccaagcccggcctagcacgatgatcatgagtgttgctattgatgtatgttaatactatacacagtcatcgtgtgtgttttataaaactgtaagcttaggatgtttgaggctaatgtaattagcactacaccgtaataaatgagaggtttactttatgttttaataatgttcttacccttgctgctctctaaactgtaatggcgtacggttagctaaactaaagtaaaaatcgattcgcttgagtaaaattagtgaccgggaaagatcatcgactactactgctcagagatgtaatcggtaattaagacttcaagctcaataattaattaggagtaaatctggcttcgaatttttaaattgtcaacttccaaagaaggattggcaagactcaatctcaattgcccaacaaacatatggctctttacaaatttggaatctctttttgatggcaagaacgtcgtaattcctctgtcgatctcatgtaattaccaaactcatctacttattactttctttatatgcacttactgatgcggccgcttaattaatctgatcatggatgctacgtcacggcagtacaggactatcactagacctaggagctgtgctgggtaactcacatgagtcactggtcacatcagcggccgcagcttatagtaaagatttttttgttaataaaatgaaagttaatatttatggatttatttgaacatatttacaagtttttgttaataaatttatttacagaagtgttaaatttgaaaatgtgttaaatgagagttaatatttatggatataatattactttatttaaaaataaaatgaatttatattaaaatatgatttggtaaaagatattataaagaggaacttggatgagaaagacgacgatgggcaaaagttgcatggcacaccgcttttgttcagtaacatctgcactgtggcgcctttttcacactcaccatgcatgctgccacgtcagctttcacactatgacaccactggccatacacgttgccacctcagctttctcctcttctcactatgacacgactggccatgcatgcatgcatgctgccacctcagctcccgcctcttcacccgtgtctttctctcatgtcgcagtgctgcgtgccaacctcttctctctataaatagagagaagagaatgatggttaaactcaaaccaaaacaagaaaacatacacaaatagcaaaacggatccacaaccaaaaatgcttcagcacacttggcttccgaagcctcccaatctgaccctcttgtcagatgaggttcatctctggaggattcctcttgaccagcctgagtcacaacttcaagaccttgctgccaccctgagcagtgatgaattggcgagggcaaacagattctactttccagaacacagaaggcgtttcactgctgggagaggcatcctcagatccatcttgggtggatacttgggagtggaaccgggtcaagtcaagtttgattatgagtcccgtgggaaaccgatccttggtgacagatttgctgagagtggactcctgttcaacttgtctcacagccagaaccttgccttgtgtgctgtcaactacacgcgtcaaataggcattgatcttgaatatctgcgtccaacatctgacttggagtctcttgcaaagaggttctttctcccaagagaatatgaactcttgaggtcactccctgatgagcagaaacagaagattttctttcgttactggacttgcaaagaggcttatctcaaagcaacgggagatggaatagccaaacttgaagagatcgagatagcactcaccccaacagaacctgccaagctccaaacagctcctgcgtggtctctgttggagcttgtgccagatgacaattgtgttgcagctgtggctgttgcgggttttggttggcagcccaagttctggcattactgagtagttagcttaatcacttaggtcacccagtccaagcccggcctagcacgatgatcatgagtgttgctattgatgtatgttaatactatacacagtcatcgtgtgtgttttataaaactgtaagcttaggatgtttgaggctaatgtaattagcactacaccgtaataaatgagaggtttactttatgttttaataatgttcttacccttgctgctctctaaactgtaatggcgtacggttagctaaactaaagtaaaaatcgattcgcttgagtaaaattagtgaccgggaaagatcatcgactactactgctcagagatgtaatcggtaattaagacttcaagctcaataattaattaggagtaaatctggcttcgaatttttaaattgtcaacttccaaagaaggattggcaagactcaatctcaattgcccaacaaacatatggctctttacaaatttggaatctctttttgatggcaagaacgtcgtaattcctctgtcgatctcatgtaattaccaaactcatctacttattactttctttatatgcacttactgatgcggccgcttaattaactactgtcactgaggccgtagacgagtacggactgatctaactagtgctagcctcgaggtcgacacccagcttt

SEQ ID NO: 56 - DNA, 39630 bp, Artificial sequence
  plasmid pDAB101412
cttgtacaaagtggttgcggccgcttaattaaatttaaattcaattaatgcaatcttgattttcaacaacgaaggtaatggcgtaaaagaaaaaatgtatgttattgtattgatctttcatgatgttgaagcgtgccataatatgatgatgtataattaaaatattaactgtcgcattttattgaaatggcactgttatttcaaccatatctttgattctgttacatgacacgactgcaagaagtaaataatagacgccgttgttaaagaattgctatcatatgtgcctaactagagggaatttgagcgtcagacctaatcaaatattacaaaatatctcactctgtcgccagcaatggtgtaatcagcgcagacaaatggcgtaaagatcgcggaaaaacctccccgagtggcatgatagctgcctctgtattgctgatttagtcagccttatttgacttaagggtgccctcgttagtgacaaattgctttcaaggagacagccatgccccacactttgttgaaaaacaaattgcctttggggagacggtaaagccagttgctcttcaataaggaatgtcgaggaggcaatgtaaccgcctctggtagtacacttctctaatccaaaaatcaatttgtattcaagataccgcaaaaaacttatggtttaaaccctgcaggactagtccagaaggtaattatccaagatgtagcatcaagaatccaatgtttacgggaaaaactatggaagtattatgtaagctcagcaagaagcagatcaatatgcggcacatatgcaacctatgttcaaaaatgaagaatgtacagatacaagatcctatactgccagaatacgaagaagaatacgtagaaattgaaaaagaagaaccaggcgaagaaaagaatcttgaagacgtaagcactgacgacaacaatgaaaagaagaagataaggtcggtgattgtgaaagagacatagaggacacatgtaaggtggaaaatgtaagggcggaaagtaaccttatcacaaaggaatcttatcccccactacttatccttttatatttttccgtgtcatttttgcccttgagttttcctatataaggaaccaagttcggcatttgtgaaaacaagaaaaaatttggtgtaagctattttctttgaagtactgaggatacaacttcagagaaatttgtaagtttgtaggtaccagatctggatcccaaaccatgtctccggagaggagaccagttgagattaggccagctacagcagctgatatggccgcggtttgtgatatcgttaaccattacattgagacgtctacagtgaactttaggacagagccacaaacaccacaagagtggattgatgatctagagaggttgcaagatagatacccttggttggttgctgaggttgagggtgttgtggctggtattgcttacgctgggccctggaaggctaggaacgcttacgattggacagttgagagtactgtttacgtgtcacataggcatcaaaggttgggcctaggatctacattgtacacacatttgcttaagtctatggaggcgcaaggttttaagtctgtggttgctgttataggccttccaaacgatccatctgttaggttgcatgaggctttgggatacacagcccggggtacattgcgcgcagctggatacaagcatggtggatggcatgatgttggtttttggcaaagggattttgagttgccagctcctccaaggccagttaggccagttacccaaatctgagtagttagcttaatcacctagagctcgatcggcggcaatagcttcttagcgccatcccgggttgatcctatctgtgttgaaatagttgcggtgggcaaggctctctttcagaaagacaggcggccaaaggaacccaaggtgaggtgggctatggctctcagttccttgtggaagcgcttggtctaaggtgcagaggtgttagcgggatgaagcaaaagtgtccgattgtaacaagatatgttgatcctacgtaaggatattaaagtatgtattcatcactaatataatcagtgtattccaatatgtactacgatttccaatgtctttattgtcgccgtatgtaatcggcgtcacaaaataatccccggtgactttcttttaatccaggatgaaataatatgttattataatttttgcgatttggtccgttataggaattgaagtgtgcttgaggtcggtcgccaccactcccatttcataattttacatgtatttgaaaaataaaaatttatggtattcaatttaaacacgtatacttgtaaagaatgatatcttgaaagaaatatagtttaaatatttattgataaaataacaagtcaggtattatagtccaagcaaaaacataaatttattgatgcaagtttaaattcagaaatatttcaataactgattatatcagctggtacattgccgtagatgaaagactgagtgcgatattatggtgtaatacataggaattcgtttaaacgatctgcgtctaattttcggtccaacttgcacaggaaagacgtcgaccgcggtagctcttgcccagcagactgggcttccagtcctttcgctcgatcgggtccaatgttgtcctcagctgtgaaccggaagcggacgaccaacagtggaagaactgaaaggaacgagccgtctataccttgatgatcggcctctggtgaagggtatcatcgcagccaagcaagctcatgaaaggctgatgggggaggtgtataattatgaggcccacggcgggcttattctttagggaggatctatctcgttgctcaagtgcatggcgcaaagcagttattggagtgcggattttcgttggcatattattcgccacgagttagcagacgaagagaccttcatgaacgtggccaaggccagagttaagcagatgttacgccctgctgcaggcctttctattatccaatagttggttgatctttggaaagagcctcggctgaggcccatactgaaagagatcgatggatatcgatatgccatgttgtttgctagccagaaccagatcacatccgatatgctattgcagcttgacgcagatatggaggataagttgattcatgggatcgctcaggagtagctcatccatgcacgccgacaagaacagaaattccgtcgagttaacgcagccgcttacgacggattcgaaggtcatccattcggaatgtattagtttgcaccagctccgcgtcacacctgtcttcatttgaataagatgttagcaattgtttttagctttgtcttgttgtggcagggcggcaagtgcttcagacatcattctgttttcaaattttatgctggagaacagcttcttaattcctttggaaataatagactgcgtcttaaaattcagatgtctggatatagatatgattgtaaaataacctatttaagtgtcatttagaacataagttttatgaatgttcttccattttcgtcatcgaacgaataagagtaaatacaccttttttaacattacaaataagttcttatacgttgtttatacaccgggaatcatttccattattttcgcgcaaaagtcacggatattcgtgaaagcgacataaactgcgaaatttgcggggagtgtcttgagtttgcctcgaggctagcgcatgcacatagacacacacatcatctcattgatgcttggtaataattgtcattagattgtttttatgcatagatgcactcgaaatcagccaattttagacaagtatcaaacggatgtgacttcagtacattaaaaacgtccgcaatgtgttattaagttgtctaagcgtcaatttgatttacaattgaatatatcctgccccagccagccaacagctcgatttacaattgaatatatcctgccggccggcccacgcgtgtcgaggaattctgatctggcccccatttggacgtgaatgtagacacgtcgaaataaagatttccgaattagaataatttgtttattgctttcgcctataaatacgacggatcgtaatttgtcgttttatcaaaatgtactttcattttataataacgctgcggacatctacatttttgaattgaaaaaaaattggtaattactctttctttttctccatattgaccatcatactcattgctgatccatgtagatttcccggacatgaagccatttacaattgaatatatcctgccgccgctgccgctttgcacccggtggagcttgcatgttggtttctacgcagaactgagccggttaggcagataatttccattgagaactgagccatgtgcaccttccccccaacacggtgagcgacggggcaacggagtgatccacatgggacttttaaacatcatccgtcggatggcgttgcgagagaagcagtcgatccgtgagatcagccgacgcaccgggcaggcgcgcaacacgatcgcaaagtatttgaacgcaggtacaatcgagccgacgttcacgcggaacgaccaagcaagcttggctgccatttttggggtgaggccgttcgcggccgaggggcgcagcccctggggggatgggaggcccgcgttagcgggccgggagggttcgagaagggggggcaccccccttcggcgtgcgcggtcacgcgcacagggcgcagccctggttaaaaacaaggtttataaatattggtttaaaagcaggttaaaagacaggttagcggtggccgaaaaacgggcggaaacccttgcaaatgctggattttctgcctgtggacagcccctcaaatgtcaataggtgcgcccctcatctgtcagcactctgcccctcaagtgtcaaggatcgcgcccctcatctgtcagtagtcgcgcccctcaagtgtcaataccgcagggcacttatccccaggcttgtccacatcatctgtgggaaactcgcgtaaaatcaggcgttttcgccgatttgcgaggctggccagctccacgtcgccggccgaaatcgagcctgcccctcatctgtcaacgccgcgccgggtgagtcggcccctcaagtgtcaacgtccgcccctcatctgtcagtgagggccaagttttccgcgaggtatccacaacgccggcggccgcggtgtctcgcacacggcttcgacggcgtttctggcgcgtttgcagggccatagacggccgccagcccagcggcgagggcaaccagcccggtgagcgtcggaaagggtcgacggatcttttccgctgcataaccctgcttcggggtcattatagcgattttttcggtatatccatcctttttcgcacgatatacaggattttgccaaagggttcgtgtagactttccttggtgtatccaacggcgtcagccgggcaggataggtgaagtaggcccacccgcgagcgggtgttccttcttcactgtcccttattcgcacctggcggtgctcaacgggaatcctgctctgcgaggctggccggctaccgccggcgtaacagatgagggcaagcggatggctgatgaaaccaagccaaccaggaagggcagcccacctatcaaggtgtactgccttccagacgaacgaagagcgattgaggaaaaggcggcggcggccggcatgagcctgtcggcctacctgctggccgtcggccagggctacaaaatcacgggcgtcgtggactatgagcacgtccgcgagctggcccgcatcaatggcgacctgggccgcctgggcggcctgctgaaactctggctcaccgacgacccgcgcacggcgcggttcggtgatgccacgatcctcgccctgctggcgaagatcgaagagaagcaggacgagcttggcaaggtcatgatgggcgtggtccgcccgagggcagagccatgacttttttagccgctaaaacggccggggggtgcgcgtgattgccaagcacgtccccatgcgctccatcaagaagagcgacttcgcggagctggtattcgtgcagggcaagattcggaataccaagtacgagaaggacggccagacggtctacgggaccgacttcattgccgataaggtggattatctggacaccaaggcaccaggcgggtcaaatcaggaataagggcacattgccccggcgtgagtcggggcaatcccgcaaggagggtgaatgaatcggacgtttgaccggaaggcatacaggcaagaactgatcgacgcggggttttccgccgaggatgccgaaaccatcgcaagccgcaccgtcatgcgtgcgccccgcgaaaccttccagtccgtcggctcgatggtccagcaagctacggccaagatcgagcgcgacagcgtgcaactggctccccctgccctgcccgcgccatcggccgccgtggagcgttcgcgtcgtctcgaacaggaggcggcaggtttggcgaagtcgatgaccatcgacacgcgaggaactatgacgaccaagaagcgaaaaaccgccggcgaggacctggcaaaacaggtcagcgaggccaagcaggccgcgttgctgaaacacacgaagcagcagatcaaggaaatgcagctttccttgttcgatattgcgccgtggccggacacgatgcgagcgatgccaaacgacacggcccgctctgccctgttcaccacgcgcaacaagaaaatcccgcgcgaggcgctgcaaaacaaggtcattttccacgtcaacaaggacgtgaagatcacctacaccggcgtcgagctgcgggccgacgatgacgaactggtgtggcagcaggtgttggagtacgcgaagcgcacccctatcggcgagccgatcaccttcacgttctacgagctttgccaggacctgggctggtcgatcaatggccggtattacacgaaggccgaggaatgcctgtcgcgcctacaggcgacggcgatgggcttcacgtccgaccgcgttgggcacctggaatcggtgtcgctgctgcaccgcttccgcgtcctggaccgtggcaagaaaacgtcccgttgccaggtcctgatcgacgaggaaatcgtcgtgctgtttgctggcgaccactacacgaaattcatatgggagaagtaccgcaagctgtcgccgacggcccgacggatgttcgactatttcagctcgcaccgggagccgtacccgctcaagctggaaaccttccgcctcatgtgcggatcggattccacccgcgtgaagaagtggcgcgagcaggtcggcgaagcctgcgaagagttgcgaggcagcggcctggtggaacacgcctgggtcaatgatgacctggtgcattgcaaacgctagggccttgtggggtcagttccggctgggggttcagcagccagcgctttactggcatttcaggaacaagcgggcactgctcgacgcacttgcttcgctcagtatcgctcgggacgcacggcgcgctctacgaactgccgataaacagaggattaaaattgacaattgtgattaaggctcagattcgacggcttggagcggccgacgtgcaggatttccgcgagatccgattgtcggccctgaagaaagctccagagatgttcgggtccgtttacgagcacgaggagaaaaagcccatggaggcgttcgctgaacggttgcgagatgccgtggcattcggcgcctacatcgacggcgagatcattgggctgtcggtcttcaaacaggaggacggccccaaggacgctcacaaggcgcatctgtccggcgttttcgtggagcccgaacagcgaggccgaggggtcgccggtatgctgctgcgggcgttgccggcgggtttattgctcgtgatgatcgtccgacagattccaacgggaatctggtggatgcgcatcttcatcctcggcgcacttaatatttcgctattctggagcttgttgtttatttcggtctaccgcctgccgggcggggtcgcggcgacggtaggcgctgtgcagccgctgatggtcgtgttcatctctgccgctctgctaggtagcccgatacgattgatggcggtcctgggggctatttgcggaactgcgggcgtggcgctgttggtgttgacaccaaacgcagcgctagatcctgtcggcgtcgcagcgggcctggcgggggcggtttccatggcgttcggaaccgtgctgacccgcaagtggcaacctcccgtgcctctgctcacctttaccgcctggcaactggcggccggaggacttctgctcgttccagtagctttagtgtttgatccgccaatcccgatgcctacaggaaccaatgttctcggcctggcgtggctcggcctgatcggagcgggtttaacctacttcctttggttccgggggatctcgcgactcgaacctacagttgtttccttactgggctttctcagcccccgagcgcttagtgggaatttgtaccccttatcgaaccgggagcacaggatgacgcctaacaattcattcaagccgacaccgcttcgcggcgcggcttaattcaggagttaaacatcatgagggaagcggtgatcgccgaagtatcgactcaactatcagaggtagttggcgtcatcgagcgccatctcgaaccgacgttgctggccgtacatttgtacggctccgcagtggatggcggcctgaagccacacagtgatattgatttgctggttacggtgaccgtaaggcttgatgaaacaacgcggcgagctttgatcaacgaccttttggaaacttcggcttcccctggagagagcgagattctccgcgctgtagaagtcaccattgttgtgcacgacgacatcattccgtggcgttatccagctaagcgcgaactgcaatttggagaatggcagcgcaatgacattcttgcaggtatcttcgagccagccacgatcgacattgatctggctatcttgctgacaaaagcaagagaacatagcgttgccttggtaggtccagcggcggaggaactctttgatccggttcctgaacaggatctatttgaggcgctaaatgaaaccttaacgctatggaactcgccgcccgactgggctggcgatgagcgaaatgtagtgcttacgttgtcccgcatttggtacagcgcagtaaccggcaaaatcgcgccgaaggatgtcgctgccgactgggcaatggagcgcctgccggcccagtatcagcccgtcatacttgaagctaggcaggcttatcttggacaagaagatcgcttggcctcgcgcgcagatcagttggaagaatttgttcactacgtgaaaggcgagatcaccaaggtagtcggcaaataatgtctaacaattcgttcaagccgacgccgcttcgcggcgcggcttaactcaagcgttagagagctggggaagactatgcgcgatctgttgaaggtggttctaagcctcgtcttgcgatggcatttcgatccattcccattccgcgctcaagatggcttcccctcggcagttcatcagggctaaatcaatctagccgacttgtccggtgaaatgggctgcactccaacagaaacaatcaaacaaacatacacagcgacttattcacacgagctcaaattacaacggtatatatcctgccagtcagcatcatcacaccaaaagttaggcccgaatagtttgaaattagaaagctcgcaattgaggtctacaggccaaattcgctcttagccgtacaatattactcaccggatcctaaccggtttaattaaggcgcgccatgcccgggcaagcggccgcacaagtttgtacaaaaaagcaggcttctaggatctgcttttacatgcgagacacatcttctaaagtaattttaataatagttactatattcaagatttcatatatcaaatactcaatattacttctaaaaaattaattagatataattaaaatattacttttttaattttaagtttaattgttgaatttgtgactattgatttattattctactatgtttaaattgttttatagatagtttaaagtaaatataagtaatgtagtagagtgttagagtgttaccctaaaccataaactataagatttatggtggactaattttcatatatttcttattgcttttaccttttcttggtatgtaagtccgtaactggaattactgtgggttgccatgacactctgtggtcttttggttcatgcatggatcttgcgcaagaaaaagacaaagaacaaagaaaaaagacaaaacagagagacaaaacgcaatcacacaaccaactcaaattagtcactggctgatcaagatcgccgcgtccatgtatgtctaaatgccatgcaaagcaacacgtgcttaacatgcactttaaatggctcacccatctcaacccacacacaaacacattgcctttttcttcatcatcaccacaaccacctgtatatattcattctcttccgccacctcaatttcttcacttcaacacacgtcaacctgcatatgcgtgtcatcccatgcccaaatctccatgcatgttccaaccaccttctctcttatataatacctataaatacctctaatatcactcacttctttcatcatccatccatccagagtactactactctactactataataccccaacccaactcatattcaatactactctaggatccacaaccaaaaatggcagcgaggctgcaagagcagaaaggaggtgagatggacacgaggattgcgatcataggcatgagcgccatacttccttgtggaaccacggtgagagagtcatgggagaccataagggctggcattgattgcctgtctgatcttcctgaggatcgtgttgatgtgactgcgtactttgacccagtcaagaccacaaaggacaaaatctactgcaagagaggaggtttcattcctgagtatgactttgatgcgcgtgagtttggtctcaacatgttccagatggaagattctgatgcgaatcagaccatctcacttctcaaggtcaaagaagcacttcaagatgctgggattgatgcacttggaaaggagaagaaaaacataggatgcgtgcttggcattggaggtggacagaagagttcacatgagttctacagcagactcaactatgtggttgtggagaaagtcttgagaaagatggggatgccagaggaagatgtcaaagtggctgtggagaagtacaaagcgaacttcccagaatggagacttgactctttccctggattccttgggaatgtcactgctggcagatgcaccaacacattcaacttggatggcatgaactgcgttgtggatgctgcatgtgcaagctccttgatagcagtcaaggttgcgattgatgaactgctctatggtgactgcgacatgatggtcactggtgcaacctgcacagacaactccattgggatgtacatggctttctcaaagacacctgtgttcagcacggacccaagtgtgagagcgtatgatgagaaaacgaaagggatgctcattggtgagggatcagccatgttggtgctcaaacgttatgcagatgcagtgagggatggtgatgagattcatgctgtgattcgtggttgtgcaagctcaagtgatggcaaagcagctggcatctacactcccacaatcagtggtcaagaggaagccttgagacgtgcatacaatcgtgcctgcgttgaccctgccactgtcactttggttgagggtcatgggactggcactccagttggagataggattgagttgactgcgttgaggaacttgtttgacaaagcgtatggtgaagggaacacagagaaagttgcagttggaagtatcaagtccagtattggtcatttgaaggctgttgctggtcttgctggaatgatcaaggtcatcatggctctcaaacacaagactttgcctggaacgatcaatgtggacaatccacccaatctctatgacaacactcccatcaatgagtcatccctctacatcaacacgatgaacagaccctggttccctccacctggtgttccgagacgtgctggaatatccagctttggctttggaggtgccaactaccatgcagtgttggaagaggctgaaccagagcacacgacagcgtacagactcaacaaacgtccacaaccggtgttgatgatggctgcaactcctgctgcgttgcagagcctttgtgaagctcagctgaaagagtttgaagctgcgatcaaggagaatgagacagtcaagaatactgcctacatcaagtgtgtcaagtttggagaacagttcaagttccctgggagcatacctgcgaccaatgcgagactgggattcttggtcaaagatgcggaggatgcgtgctccacgcttcgtgctatatgtgctcagtttgccaaagatgtgaccaaagaagcgtggaggcttccgagagaaggagtttctttccgtgccaaaggcattgccaccaatggtgctgttgctgcactcttctctggacaaggtgctcagtacacacacatgttcagtgaagttgcgatgaactggcctcagttcagacagtccattgctgcaatggacgctgcacagtccaaggttgctggaagtgacaaagactttgaaagagtctctcaagtcctgtacccaaggaaaccgtacgaacgtgagccagaacaagatcacaagaaaatctcactcacagcatacagccagccgtcaaccctggcatgtgctcttggtgcctttgagattttcaaggaagctggattcactccagactttgcagctggacacagcttgggtgagtttgctgcgctctatgcagctggttgtgttgacagagatgagttgtttgaacttgtttgcagaagggcaaggatcatgggaggcaaagatgcacctgccacacccaaaggttgcatggcagctgtcataggacccaacgcagagaacatcaaggttcaagctgccaacgtctggcttggaaactcaaactctccgtctcagactgtcattactgggtctgttgaagggattcaagctgaaagtgccagattgcagaaggaagggttcagagttgtgcctcttgcttgtgagtctgccttccattctccacagatggaaaatgccagctcagctttcaaagatgtcatatccaaggtttccttccgtacacccaaagcagaaacaaagctcttcagcaatgtttctggagagacctatccgacggatgccagagagatgctcactcaacacatgacctcatctgtgaagttcctgacccaagtgaggaacatgcaccaagctggtgcgagaatctttgttgagtttggaccgaaacaagttctcagcaaacttgtttctgaaaccctcaaagatgacccgtctgttgtcacagtgtctgtgaacccagcttctggcacggactctgacatacagttgagggatgctgcagttcagctggttgtggctggtgtcaatcttcaagggtttgacaagtgggatgctcctgatgccacgaggatgcaagccatcaagaaaaagagaaccacactcagactttcagctgccacctatgtcagtgacaagaccaagaaagtgagggatgctgccatgaacgacggaagatgtgtcacatacctcaagggtgctgcaccactcatcaaggctcctgaacctgtggttgacgaagctgccaagagggaggctgaaaggcttcagaaggagcttcaagacgctcagaggcagcttgacgacgccaaacgtgcagctgcagaagccaactccaaacttgctgctgccaaggaggaagccaagactgctgcagcttcagccaagcctgcagttgacactgctgttgtggagaaacatcgtgccatcctcaagtccatgctggctgagctggatggttatggaagtgttgatgcttcttcccttcagcaacagcaacagcaacagactgctccggcgcctgttaaagccgctgcccctgccgctcccgttgcaagtgctcctgctcccgccgtgtccaacgagttgcttgagaaagctgagacagttgtgatggaggttctcgctgccaagactggatacgaaacagacatgattgaggcggacatggagcttgagactgagttgggaattgacagcatcaagagggttgaaattctttctgaagtccaagctatgcttaacgttgaggcgaaagatgttgatgctctctctaggacgagaacagtgggtgaagttgtcaacgctatgaaggcagaaatcgctggttcttccgctccggcgccggcagctgccgcacctgcaccggctaaagcggctccagctgcagctgcaccagctgtttctaatgagctgctcgaaaaggcagaaactgttgtgatggaagtccttgctgccaaaactggctacgaaactgacatgatagaatcagacatggagcttgagacggagcttggaattgattccatcaagcgtgtggaaatcctcagtgaagtccaagccatgctcaatgtggaagctaaggatgtggatgctctctcaaggaccagaactgtcggtgaggttgtcaatgccatgaaggctgagatagctggaggctccgctcctgcgccggccgctgccgctcctggtcccgctgccgcggctccagctccagctgcagccgctccggccgtctcaaacgaactccttgaaaaagctgagaccgtcgtgatggaggtcttggcagctaaaaccggctatgagactgacatgattgagtctgacatggaattggagacagaacttgggatagacagcatcaaacgtgttgaaatcctcagtgaggtccaagctatgctgaacgtggaagcgaaggatgttgatgctctgtccagaacgaggaccgttggtgaggttgtggatgccatgaaggctgaaattgctggagggtctgcgcccgcgccagctgcagccgctcctgcacccgcagccgcggcacctgctccagctgcacctgcacctgccgtttcttcagaactcttggagaaggctgagacggttgtgatggaggttttggctgcaaagactggctatgagaccgacatgattgaatctgatatggaattggagacagagcttgggatcgattccatcaaaagagtggagatcctgagtgaagtccaagccatgctcaatgttgaagctaaggatgttgatgcactttcaagaacaaggacagtgggtgaggttgtggatgccatgaaggcggagattgctggagggagcgcgcctgcgccagctgccgcggcacctgcaccggcagccgcagctccagctccagctgcaccagcaccggccgcgcccgcgccagctgtttcatccgaactcctggaaaaggccgagacggttgtgatggaggtgctcgcagctaagactggttacgagaccgacatgattgaaagtgacatggagcttgaaaccgagttgggaatagatagcatcaaacgtgttgaaatcttgtctgaggtccaagctatgttgaacgtggaggcaaaagatgtcgatgcgctttcaagaaccagaacagtcggtgaggtcgtggacgccatgaaggctgaaattgccggaagctctgctagtgcgccagctgcagccgcacctgcacctgctgccgcggcacctgctccagctgcagccgctcctgccgtcagcaatgagttgctggagaaagccgaaacagttgtgatggaagtccttgctgcaaaaactggttacgaaacggacatgattgagtcagacatggaattggagaccgaacttggaatagattccatcaagagagtggagatcctctctgaggtgcaagccatgctcaacgttgaggctaaagatgttgatgcactcagtaggacaagaactgtgggggaagttgtcgatgcgatgaaggctgagattgctggaggctctgctcctgcgccggcagctgccgcacctgcacccgcagccgcggcaccagctgtcagcaacgaattgcttgagaaggctgaaacagttgtcatggaagtgctggctgcaaaaaccggctatgagactgacatgattgagtctgacatggaacttgagacggaattgggcattgacagcatcaagcgtgttgagatcctcagtgaagtccaagcaatgctcaatgtggaggctaaggatgtggatgccctctcaaggaccagaacagttggtgaggtcgttgatgcgatgaaggcggagatcgctggaagttccgcgcctgcgccagctgcagccgctcctgcacccgcagccgcggcaccggctccagctgcagccgcaccggccgtctcctcagaactcctggaaaaggctgagacagttgtgatggaagtccttgctgcgaaaactggctatgagaccgacatgattgaatctgacatggaactggagaccgagcttggaattgactccatcaaacgtgttgaaatcctctctgaggttcaagcgatgttgaatgtggaggccaaagatgttgatgctctttccagaacaaggacggtgggagaggtggttgatgccatgaaggctgagatagctgggggttctgctcctgcgccagctgcagccgctcctgctcccgctgccgcggcaccagctgtcagcaacgaactccttgaaaaagctgaaactgttgtgatggaggttttggctgcaaagactggatacgagactgacatgatagagtcagacatggagttggaaacagagcttgggattgatagcatcaagcgtgtggaaatcctttctgaggttcaagccatgctgaacgttgaggccaaagatgtcgatgctttgtcaaggaccagaacggttggagaagtggtcgatgccatgaaggctgagatagctggtggatcagcccctgctccggctgcagccgctcctgcaagtgccggtgctgcaccagctgtgaagattgattcagttcatggtgctgactgtgacgatttgtcactgatgcacgcaaaggtggttgacatcagaaggccagatgaactgattctggaaagaccggagaaccgtccagttcttgtcgttgacgatggctcagagttgacacttgctcttgtgagggtgttgggagcctgtgcagttgtcttgacctttgagggattgcagttggctcagagagctggtgcagctgccattcgtcatgttctggctaaggacctttcagcagaatcagctgagaaggccatcaaagaggctgagcaaagatttggagcgttgggaggcttcataagccagcaagcagaaaggtttgaaccagctgagatactgggtttcacactcatgtgtgcgaagtttgccaaagcctctctctgcactgctgtggctggaggtcgtcctgccttcatcggtgtggctaggcttgacggcagacttggattcacctctcaaggcacttctgacgcactcaagagagcacagcgtggagcgatctttggactctgcaagacaatagggttggagtggtcagaatctgatgtgttcagccgtggtgtggacattgctcaagggatgcacccagaagatgctgcagttgccatagttagggagatggcgtgtgctgacatcagaatcagagaggttgggattggagcaaaccagcaaagatgcacaatcagagctgccaagttggagactgggaaccctcagagacagatagcgaaagacgatgtgcttctggtttctggaggtgctcgtgggatcacacctctttgcatccgtgagatcacgcgtcagattgctggaggcaagtacattctgttgggtcgtagcaaagtttctgcgtctgaaccagcatggtgtgctggcatcactgatgagaaggctgtgcagaaagctgccacccaagagttgaagagggccttcagtgctggtgaaggacccaaacccactccaagggctgtcacgaaacttgtgggatctgttcttggtgctcgtgaagtgagaagctccattgctgccattgaagctctgggtggcaaagcgatctacagctcttgtgatgtgaactctgctgcagatgttgccaaagcagttagggatgcagagtcccagcttggtgccagagttagtggaatcgttcacgcttctggtgtgctccgtgatcgtctcatagagaagaaactccctgacgagtttgatgctgtctttgggaccaaagtcactgggttggagaatcttctggctgcagttgatcgtgccaacctcaaacacatggttctcttcagctcccttgctggtttccacggcaatgttggtcagtctgactatgcgatggcaaacgaagctctcaacaagatgggtttggaacttgcgaaggatgtcagtgtcaagtccatctgctttggtccctgggatggtgggatggtgacacctcaactcaagaaacagtttcaagaaatgggagttcagatcattcctcgtgaaggaggtgctgatacagttgcgaggattgtgttgggatcaagtcctgctgagatccttgttggaaactggaggacaccatccaagaaagttggaagtgacacgatcaccctgcatagaaagatcagtgccaagtccaatcccttcttggaggatcatgtcatacaaggcagaagggtgttgccaatgacccttgctattgggagccttgctgagacctgccttggactcttccctggctactctctctgggccatagatgacgcacagctcttcaaaggtgtcactgttgatggagacgtcaactgtgaagtgaccctcacaccgtccactgctccgagtgggagggtgaatgtccaagcgacgctcaagacgttctcaagtggaaaacttgttccagcctacagagctgtcatagtgttgtccaaccaaggtgctccacctgccaatgcaaccatgcagcctccgagccttgatgcagatcctgctttgcaagggtcagtctatgatggcaagactctctttcatggtcctgcgttcagaggcattgatgacgttctcagctgcaccaagagccagcttgttgccaagtgttctgctgttcctggatcagatgcagccagaggagagtttgcaactgacactgatgcacatgatccctttgtcaatgatcttgcctttcaagcaatgttggtctgggtgaggagaacgctgggacaagctgcactcccgaactccattcagaggatagtccaacacagaccggtcccacaagacaaacccttctacatcaccctcagatccaatcagagtggtggacatagccagcacaaacatgcacttcagttccacaacgaacaaggtgatctcttcattgatgttcaagcctctgtcattgcgacagactcacttgcgttctgagtagttagcttaatcacttaggtcacctcgagtatcaaaatctatttagaaatacacaatattttgttgcaggcttgctggagaatcgatctgctatcataaaaattacaaaaaaattttatttgcctcaattattttaggattggtattaaggacgcttaaattatttgtcgggtcactacgcatcattgtgattgagaagatcagcgatacgaaatattcgtagtactatcgataatttatttgaaaattcataagaaaagcaaacgttacatgaattgatgaaacaatacaaagacagataaagccacgcacatttaggatattggccgagattactgaatattgagtaagatcacggaatttctgacaggagcatgtcttcaattcagcccaaatggcagttgaaatactcaaaccgccccatatgcaggagcggatcattcattgtttgtttggttgcctttgccaacatgggagtccaaggttggcgcgccgaattcgcggccgcttaattaagatgagtgatactcaggactcaggactcactctgctgatcactagtgctagcctcgaggtcgacacaactttgtatacaaaagttgtctaggatctgcttttacatgcgagacacatcttctaaagtaattttaataatagttactatattcaagatttcatatatcaaatactcaatattacttctaaaaaattaattagatataattaaaatattacttttttaattttaagtttaattgttgaatttgtgactattgatttattattctactatgtttaaattgttttatagatagtttaaagtaaatataagtaatgtagtagagtgttagagtgttaccctaaaccataaactataagatttatggtggactaattttcatatatttcttattgcttttaccttttcttggtatgtaagtccgtaactggaattactgtgggttgccatgacactctgtggtcttttggttcatgcatggatcttgcgcaagaaaaagacaaagaacaaagaaaaaagacaaaacagagagacaaaacgcaatcacacaaccaactcaaattagtcactggctgatcaagatcgccgcgtccatgtatgtctaaatgccatgcaaagcaacacgtgcttaacatgcactttaaatggctcacccatctcaacccacacacaaacacattgcctttttcttcatcatcaccacaaccacctgtatatattcattctcttccgccacctcaatttcttcacttcaacacacgtcaacctgcatatgcgtgtcatcccatgcccaaatctccatgcatgttccaaccaccttctctcttatataatacctataaatacctctaatatcactcacttctttcatcatccatccatccagagtactactactctactactataataccccaacccaactcatattcaatactactctaggatccacaaccaaaaatggctgcaaggaacgtgagtgcggctcatgagatgcatgacgagaagaggatagctgttgtgggcatggctgttcagtatgctggatgcaaaacgaaagacgagttctgggaagttctcatgaatggaaaagttgagagcaaagtgatcagcgacaaacgtcttggttcaaattaccgtgctgaacactacaaagctgaaaggagcaagtatgctgacaccttctgcaatgagacatatggaactcttgatgagaacgaaatagacaatgagcatgaactccttttgaaccttgccaaacaagccttggctgaaacatctgtcaaagattcaacaagatgtggcatagtttctggatgcctcagcttcccgatggacaacctccaaggtgaactcttgaatgtgtaccagaaccatgttgagaagaaacttggtgccagagttttcaaagatgcctctcactggtcagaaagagaacagtccaacaaaccagaggctggtgacagaagaatcttcatggaccctgcttcctttgttgctgaggaactcaatcttggcgctctccactactctgttgatgctgcctgtgccactgcgctctatgtgctcagactggcgcaagatcacttggtctctggtgcagctgatgtgatgctttgtggtgcaacatgcctgccggagccgtttttcatactctctgggttctcaaccttccaagccatgcctgttggaacgggtcagaatgtgtccatgccgctgcacaaagattctcaaggattgacccctggtgaaggaggttccatcatggtcctcaaacgtttggatgacgcaatcagagatggagatcacatctatggaacacttttgggagccaatgtcagcaacagtggcactggtctgccacttaaaccccttttgccgtcagagaaaaagtgcctcatggacacctacacacgtatcaatgtgcatccccacaagattcagtatgttgaatgccatgcaactgggactccacaaggtgatcgtgtggaaattgatgctgtgaaggcttgctttgaaggcaaagtcccacgttttggaaccacaaaagggaactttggacacacattggtggcagctgggtttgctggcatgtgcaaagtgcttctctccatgaagcacgggatcattccacccactccgggaatagatgacgaaacgaagatggaccctctggttgtctctggtgaggccattccctggccagaaacgaatggagaaccgaagcgtgctggtctctcagcgtttggatttggtgggaccaatgctcatgctgtctttgaggaacatgacccaagcaatgctgcatgcactggccatgactccatttctgctctctctgcacgttgtggtggtgagtcaaacatgagaatagcaatcactgggatggatgccacttttggtgctttgaaaggattggatgcttttgaaagggccatctacactggtgctcatggtgctataccactcccagaaaagagatggagattcctggggaaagacaaggacttccttgatctttgtggagtcaaagcaacaccgcatggctgttacattgaagatgttgaagttgatttccagaggctgaggactccaatgactcctgaagatatgctcttgcctcaacagcttctggctgtcaccacaattgatagggccatattggactctggcatgaagaaaggtggaaatgtggctgtctttgtggggttggggaccgatcttgaactctaccgtcaccgtgcaagggttgctctcaaggagagagtgaggcctgaagccagcaagaaactcaatgacatgatgcagtacatcaatgattgtgggacaagcacttcttacaccagctacataggcaacttggttgcaacaagggtcagttcacaatggggcttcacgggaccttccttcacaatcacagaaggcaacaattctgtgtacagatgtgctgaacttggcaaatacctcttggaaacgggagaggttgatggggttgtggttgcgggtgttgatctctgtgggagtgctgagaacctttacgtcaagtcaaggcgtttcaaggtgtctacatctgacaccccgagagccagctttgatgcagctgctgatggttactttgttggagagggctgtggtgcatttgtgctcaagcgtgagacaagctgcaccaaggatgacagaatctatgcttgcatggatgccatagttcctggaaatgttccatctgcatgtttgagagaggcattggatcaagccagagtcaagcctggagacatcgagatgttggagctttctgctgattcagcgaggcatttgaaggacccgtctgttctcccaaaggaactcactgctgaggaagagattggcggacttcagacgattcttcgtgacgatgacaagctcccaaggaatgttgcaactggaagtgtcaaggccactgttggtgacactggttatgcttctggtgctgccagtttgattaaggctgcgctttgcatctacaaccgttacctgcccagcaatggagatgactgggatgaacctgcacctgaagcaccctgggacagcacactctttgcgtgccagacctcaagagcttggttgaagaaccctggtgagagacgttatgcggctgtttccggagtcagtgaaaccagaagttgctacagtgtgctgctttctgaagcagagggacactacgagagagagaacagaatcagtttggatgaggaagcacccaagctcattgtgttgagagcagactcccatgaagagattcttggaagattggacaagataagggaaaggttcttgcagcccacgggtgctgcacccagagagtctgaattgaaggcgcaagcccgtaggatctttcttgaactccttggtgagacccttgcccaagatgcagcttcatctggaagtcagaagccccttgctctcagcttggtctccactccatccaagctccagagagaggtggaacttgcggcaaaaggcattccgagatgtctcaagatgagacgtgattggagttcccctgctggaagcagatatgcgcctgagcctttggccagtgacagagttgccttcatgtatggagaaggaaggagcccttactatggcatcacacaagacattcataggatttggcctgaacttcatgaggtcatcaatgagaaaacaaaccgtctctgggctgaaggtgacagatgggtcatgccaagggccagcttcaagagtgagcttgagtcacaacagcaagagtttgacagaaacatgattgaaatgttccgtcttggaatcctcacctcaattgccttcacaaacctggcgagagatgttctcaacatcacgcccaaagcagcctttggactcagtttgggagagatttccatgatctttgctttctccaagaaaaacggtttgataagcgatcagttgacaaaggatttgagagagtcagatgtctggaacaaagctctggctgttgagttcaatgcgctcagagaagcctggggcattccacagtctgtcccaaaagatgagttctggcaaggttacatagtgaggggaacgaaacaagacatagaagcagccatagcaccagactcaaagtatgtgaggttgaccatcatcaatgatgccaacactgctctcatcagtggaaagcctgatgcatgcaaagctgcgattgctcgtcttggtggcaacatccctgcgcttccagtcactcaaggcatgtgtgggcattgcccagaggtgggaccttacaccaaggacatcgcaaagatccacgccaaccttgagttccctgtggttgatggtcttgatctctggactaccataaaccagaagaggcttgtgccaagagccacgggtgccaaagatgaatgggctccttcatcctttggggagtatgctggacagctctatgagaaacaagccaacttccctcagatagttgaaaccatctacaagcagaactatgatgtgtttgttgaagttgggccaaacaatcacagaagcacagcagtgagaaccacgcttggaccacagagaaaccaccttgctggtgccatagacaagcagaacgaggatgcttggacgacaatagtcaagctcgtggcttcattgaaggctcaccttgttcctggagtgaccatcagtccgctctaccactccaagctcgttgcagaggctgaggcttgttatgctgcgctctgtaaaggtgagaaacccaagaaaaacaagtttgtgagaaagattcagttgaatggcagattcaacagcaaggcagaccccatctcctcagcagaccttgcatccttcccacctgcggaccctgcgattgaagctgccatctcttcaaggatcatgaagcctgtggctccgaaattctatgcgcgtctcaacattgatgagcaagatgagaccagagatccgatcttgaacaaggacaatgcgccttccagctccagctcttccagcagttcctcttccagcagttcatctccgtctcctgctccttcagctccagttcagaagaaagctgccccagctgcggagacaaaagctgttgccagtgctgatgcacttcgtagtgccctgcttgatcttgactccatgcttgcgctcagctctgcaagtgcttctggcaaccttgttgagactgcgccatctgatgccagtgtcattgtccctccgtgcaacattgctgatcttggcagcagagctttcatgaaaacttatggtgtttctgcgcctctgtacaccggtgcaatggccaagggaattgcctctgcggacttggtgatcgcagctggaaggcaaggaatccttgcgtcatttggtgctggaggccttccaatgcaagttgtgcgtgagtccattgaaaagattcaagctgccctgcccaatggaccatatgctgtcaacctcatccattctccttttgacagcaaccttgagaagggaaatgttgatctcttcttggaaaagggtgtcacttttgttgaggcttcagccttcatgacgttgacaccgcaagttgtcagatacagagcggctgggttgacgaggaatgcagatgggtcagtcaacataaggaacagaatcattgggaaagtctccagaactgagctggctgaaatgttcatgcgtcctgcacctgagcatcttttgcagaagctcattgcttctggggagatcaatcaagaacaagctgagttggccagacgtgttcctgtggctgatgacattgcggttgaagctgattctggtggacacactgacaaccgtccaatccatgtcattctgcctctgattatcaacctgagggataggcttcacagagagtgtggatacccagcaaacctgagggttcgtgttggtgctgggggtggcattgggtgtccccaagctgcgctggcaactttcaacatgggtgcctctttcattgtcactggaacagtgaaccaagttgccaaacaatctgggacgtgtgacaatgtgaggaaacagcttgcgaaagcaacttactcagatgtttgcatggcaccggcagctgacatgtttgaggaaggtgtgaaacttcaagttttgaagaaaggaacaatgttcccttcaagagccaacaaactctatgagttgttctgcaagtatgattcttttgagtccatgcctccagcagagcttgcgagggttgagaaaagaatcttcagtcgtgcattggaagaggtctgggatgagaccaagaacttctacatcaaccgtctccacaacccagagaagatacagagggctgagagggaccccaaactgaagatgtcactgtgtttcagatggtatctgtccctggcttcaaggtgggccaacactggagcttctgacagagtcatggactaccaagtttggtgtggtcctgccattggttcattcaatgatttcatcaaaggaacttaccttgatccggcagtggcaaatgagtacccgtgtgttgtgcagatcaacaaacagattcttagaggagcgtgcttcttgaggcgtcttgaaatactgagaaatgcaaggctttcagatggtgcagctgcacttgtggcgagcattgatgacacatatgtccctgctgagaagctgtgagtagttagcttaatcacttaggtcacctcgagtatcaaaatctatttagaaatacacaatattttgttgcaggcttgctggagaatcgatctgctatcataaaaattacaaaaaaattttatttgcctcaattattttaggattggtattaaggacgcttaaattatttgtcgggtcactacgcatcattgtgattgagaagatcagcgatacgaaatattcgtagtactatcgataatttatttgaaaattcataagaaaagcaaacgttacatgaattgatgaaacaatacaaagacagataaagccacgcacatttaggatattggccgagattactgaatattgagtaagatcacggaatttctgacaggagcatgtcttcaattcagcccaaatggcagttgaaatactcaaaccgccccatatgcaggagcggatcattcattgtttgtttggttgcctttgccaacatgggagtccaaggttggcgcgccgaattcgcggccgcttaattaatctgacctgaccactagacctgagtgagtacagatgtgctactagtgctagcctcgaggtcgaccaacttttctatacaaagttgtctaggatctgcttttacatgcgagacacatcttctaaagtaattttaataatagttactatattcaagatttcatatatcaaatactcaatattacttctaaaaaattaattagatataattaaaatattacttttttaattttaagtttaattgttgaatttgtgactattgatttattattctactatgtttaaattgttttatagatagtttaaagtaaatataagtaatgtagtagagtgttagagtgttaccctaaaccataaactataagatttatggtggactaattttcatatatttcttattgcttttaccttttcttggtatgtaagtccgtaactggaattactgtgggttgccatgacactctgtggtcttttggttcatgcatggatcttgcgcaagaaaaagacaaagaacaaagaaaaaagacaaaacagagagacaaaacgcaatcacacaaccaactcaaattagtcactggctgatcaagatcgccgcgtccatgtatgtctaaatgccatgcaaagcaacacgtgcttaacatgcactttaaatggctcacccatctcaacccacacacaaacacattgcctttttcttcatcatcaccacaaccacctgtatatattcattctcttccgccacctcaatttcttcacttcaacacacgtcaacctgcatatgcgtgtcatcccatgcccaaatctccatgcatgttccaaccaccttctctcttatataatacctataaatacctctaatatcactcacttctttcatcatccatccatccagagtactactactctactactataataccccaacccaactcatattcaatactactctaggatccacaaccaaaaatggcgcttcgtgtcaagaccaacaagaagccatgttgggagatgaccaaggaggaactgacctctggcaaaactgaggtgttcaactatgaggaactcctggagtttgcagagggtgacatagctaaggtttttggtccggagtttgctgtcatagacaagtaccccagaagggtgaggctgcctgctcgtgaatacctgcttgtgacaagggtcacactcatggatgccgaggtcaacaactacagagttggtgccagaatggtcactgagtatgatcttccagtgaatggcgaattgtctgagggaggtgattgtccctgggcagttctggttgagagtggacagtgcgatttgatgctgatatcatacatgggaattgatttccagaaccaaggtgacagagtttaccgtctgctcaacaccacgttgacattctatggggttgcccatgagggagagacccttgagtatgacatcagagtgaccggttttgccaaacgtttggatggtggcatctccatgttcttctttgagtatgactgctatgtcaatgggaggcttctcattgagatgagagatggctgtgctggcttcttcacaaatgaggagcttgatgcgggaaagggtgtggtgttcacaagaggggatttggctgccagagctaagattccaaagcaagatgtttctccctatgctgtcgctccctgccttcacaaaacaaaactcaacgaaaaggagatgcagaccttggttgacaaagattgggcttccgtttttggctcaaagaatggcatgccggagatcaactacaaactctgcgcacgtaagatgctcatgattgatagagtcaccagcattgaccataagggaggtgtgtacggtttgggtcagttggttggtgagaaaatcttggagagggaccattggtacttcccatgccattttgttaaggatcaagtcatggctggatctcttgtcagcgacggttgttcacaaatgctcaagatgtacatgatctggctcggtttgcaccttaccaccggaccatttgacttcagacccgtcaacggacacccgaacaaagttaggtgtaggggtcagatatctcctcataagggaaagttggtctacgtcatggagatcaaagagatgggattcgacgaggataacgatccgtacgccattgctgacgtcaacatcattgacgttgatttcgaaaagggtcaagatttcagccttgatagaatcagcgactacggaaagggggatcttaacaaaaagatcgtcgtggacttcaagggcattgctctcaagatgcagaagagatccacgaacaagaacccctccaaagttcagcccgtttttgctaacggtgcagccactgtgggaccggaagcgtccaaggccagctctggtgccagtgctagtgcttctgctgcccctgcgaagcctgctttctcagcagatgttcttgcgccaaagccagttgcacttcctgaacatatcctcaagggtgacgctctcgctccgaaagaaatgtcctggcatcccatgtcaaaacttcctggcaacccgacgccgttcttctcccctagttcttaccctccgagggcaatttgcttcatccctttccctggcaacccacttgacaacaattgcaaagctggagaaatgcctctgaactggtacaacatgtcagagttcatgtgtggaaaagttagcaactgcttgggaccagagttcgcaagatttgataagtcaaatacgagcagaagccctgcttttgatttggctcttgtgactagagttgttgaagtcacaaacatggaacatggcaagttcctgaatgttgattgcaatcccagcaaaggcacaatggtgggggagtttgactgtcctcaagatgcgtggttctttgatggttcttgcaatgatgggcacatgccttattccatcatcatggaaatcggacttcagacatccggtgttctcaccagtgtgttgaaagcaccactgacgatggacaaagatgacattctctttaggaaccttgatgcaagtgctgaaatggtgaggccagatgtggatgtgagggggaaaaccataaggaatgtgaccaagtgcactggatatgcaatgttgggaaagatggggattcacagattcacgtttgagttgtctgttgatggcgtggttttctacaaaggaagcacttcctttggatggttcactccagaggtgtttgctcagcaagctggacttgacaatgggaaaaagacggagccttggtgcaaaactaacaacacgagtgtgagaagagttgaaatcgcatcagccaaaggcaaagaacagctgactgagaaacttccagatgcaactaatgctcaagttctcagaaggtcagaacagtgtgagtatttggattacctcaacattgctcctgattctgggctgcatgggaaaggatatgcgcatggacacaaagatgttaacccacaagactggttcttctcttgtcacttttggtttgatcctgtgatgcctggatctttgggaattgagtcaatgttccagctcattgaggcatttgcggtggaccagaacataccgggagaatacaatgtgagcaatccgacctttgcccatgcccctggaaaaacggcgtggaagtaccgtggtcaattgacaccaaagaaccgtgcgatggactgtgaggtgcacatagtttcaatcacagcctctcctgaaaatggaggctacgttgacatagtggcagatggagcactttgggttgatggtctccgtgtgtatgaagccaaagaactcagagttcgtgttgtcagtgcaaaacctcaagccattccggatgttcaacaacagccacccagcgcaaaagcggaccctgggaaaactggagttgcactcagtccgactcagttgagagatgtcctgcttgaagtggacaatccattgtatcttggtgttgaaaactccaatttggtgcagtttgaatccaaacctgcaacttcttcaaggattgtcagtatcaaaccatgctccataagtgatcttggtgacaagtccttcatggaaacgtacaatgtgtcagcacctctgtacactggagcaatggccaagggaattgcgtctgcggaccttgtcattgctgctgggaagaggaagatattgggttcttttggagcgggtgggcttccaatgcaccatgtgagggcagctttggagaagatacaagcggctctgcctcaaggaccatatgctgtgaacctcattcattcaccttttgacagcaacttggaaaaggggaatgttgatctcttcctcgaaaagggcgttactgtggtggaggcttctgcattcatgaccctcactccccaagttgttcgttaccgtgcagccggactctcaaggaacgctgatgggagtgtcaacatcagaaaccgtatcattggaaaagtgtccagaacagaactcgccgaaatgttcatcagaccggctccggaacacctccttgagaaactcatagcttctggtgagataacacaagaacaagccgaacttgcccgtcgtgttcctgtcgcagacgacatcgctgttgaagctgattctggtggtcacactgacaaccgtcccatccacgtcatcttgcctttgatcatcaaccttaggaacagactgcacagagagtgtggttatcctgcgcaccttagagtcagagttggagctggaggcggtgttggctgcccacaagctgctgcggctgccctcacaatgggagctgccttcatagtgactgggactgtcaatcaagttgctaaacagtccgggacatgtgacaacgtgagaaaacaactcagtcaagccacctacagtgacatttgcatggctccagcagctgatatgtttgaggaaggtgtgaaactccaagttctcaagaagggaacaatgttcccatcaagagctaacaaattgtacgaactcttttgcaagtacgactctttcgattcaatgcctcctgctgaacttgaaaggatcgagaagaggatcttcaagagggcacttcaagaggtctgggaagagaccaaggacttttacatcaatggtttgaagaatccagagaagatacagagagcggaacatgaccccaaactcaagatgtctttgtgtttcagatggtatcttggtcttgcatcacgttgggccaacatgggtgctcctgatcgtgtcatggactatcaagtctggtgtggtccagccattggagccttcaatgacttcatcaaaggaacatatcttgatcctgctgtctctaatgagtacccatgtgttgtccagatcaaccttcagattttgcgtggtgcatgttacctgaggcgtcttaatgctctgagaaatgatccgaggattgatcttgagactgaagatgctgcctttgtctatgagccaacgaatgcgctttgagtagttagcttaatcacttaggtcacctcgagtatcaaaatctatttagaaatacacaatattttgttgcaggcttgctggagaatcgatctgctatcataaaaattacaaaaaaattttatttgcctcaattattttaggattggtattaaggacgcttaaattatttgtcgggtcactacgcatcattgtgattgagaagatcagcgatacgaaatattcgtagtactatcgataatttatttgaaaattcataagaaaagcaaacgttacatgaattgatgaaacaatacaaagacagataaagccacgcacatttaggatattggccgagattactgaatattgagtaagatcacggaatttctgacaggagcatgtcttcaattcagcccaaatggcagttgaaatactcaaaccgccccatatgcaggagcggatcattcattgtttgtttggttgcctttgccaacatgggagtccaaggttggcgcgccgaattcgcggccgcttaattaatcacgagtggatgactgtcacgactgactcatgactgactactagtgctagcctcgaggtcgacacaactttgtataataaagttgtctagacctaggatctgcttttacatgcgagacacatcttctaaagtaattttaataatagttactatattcaagatttcatatatcaaatactcaatattacttctaaaaaattaattagatataattaaaatattacttttttaattttaagtttaattgttgaatttgtgactattgatttattattctactatgtttaaattgttttatagatagtttaaagtaaatataagtaatgtagtagagtgttagagtgttaccctaaaccataaactataagatttatggtggactaattttcatatatttcttattgcttttaccttttcttggtatgtaagtccgtaactggaattactgtgggttgccatgacactctgtggtcttttggttcatgcatggatcttgcgcaagaaaaagacaaagaacaaagaaaaaagacaaaacagagagacaaaacgcaatcacacaaccaactcaaattagtcactggctgatcaagatcgccgcgtccatgtatgtctaaatgccatgcaaagcaacacgtgcttaacatgcactttaaatggctcacccatctcaacccacacacaaacacattgcctttttcttcatcatcaccacaaccacctgtatatattcattctcttccgccacctcaatttcttcacttcaacacacgtcaacctgcatatgcgtgtcatcccatgcccaaatctccatgcatgttccaaccaccttctctcttatataatacctataaatacctctaatatcactcacttctttcatcatccatccatccagagtactactactctactactataataccccaacccaactcatattcaatactactctaggatccacaaccaaaaatgcccactccagatgccactgcgcctctcaacaagccgtcagactatgctgtgtaccacgaagaggatggtcctttctggactgctgattcctctggtgtcagcagagtgaacttctctgaaactggtgtgggatctgaaggtgtcattcctgcgctcacactgattgatgtgtttgagcgtgcggtcaaacgtggtggcaataggattgcattcagaacagagaacatgccaaccttgaggcgtggagaagaggctcctgatgctttgccgctcaaagattggaagtcctggtcttggaaacagtacaaagctgatgttcacagaattgcgagggctctgatggatttgggagttgagcagcacgatgcggtctccatctttggcttcaactcaccagaatggttcctcagtgctgtcggtgcagttcatgctggtgccaagatcgctggaatctacccttcagacactcctgctcaagtgcagtacaaagccttccactctgacactgctgttgcagttgtggagaacgaacagtgcttcaagaaattcgcagaggtggttgaggatctcccttacctcaaagccattgtttgttgggattatgaagccacagacatcacaagggaagatggttcagtggttgaagtcctgacctttgctgagttcctgaagagaggtgacactgtggaagcagctgcacttgatgagagaatcagcaagattgagcccaccatgtgtgctgccctgatctacaccagtggcacaactgggagacccaaagctgtcatgatctcccatgacaaccttgtctttgaagcatctgctgtggtcccgaacttgggaggggcatgcacgaccactgctgaggaaaggattctttcctaccttcctttgtctcatgttgctggaatgatggttgacatcattgctccaatcatagcgacagcgttccacaaaggaaggatctgtgtttgttttgccagaccgtatgatttgagaactggaacccttgggcaaagactcaatgcagtggagccaaccatattccttggtgtgccacgtgtgtgggaaaagatccaagagaaattgatggctgttggtgccaaaaccactggtctcaagaagaaactcagcacggcagccaagaaacgtgggcttgaatttcaagaggaacaacagatagggagaagtggtgccaaccctggctttggaccgcttggaatctacaagaaacttttgggcctcatcaaaggaaagttggggctgaccaaatgcaagtttgcctttgctggcgcagctccaatgacccgtgaaacccttcagtactttggagcgctgaacatcaacatcaatgaggtctatggaatgtctgaatgcagtggggctgccacctggtcaactgacaaagctcatgagtggggcactgttggctatgagatgccctcctgtgaagtcagagtgttcaagattgcggaggatggcaccaagacagagtgcccaagagctgctgacatcatgcatgccacagaagaggaacaaggtgaagtttgcttccgtggaaggaacatcatgatgggatacttggccaacccgaaacttggtgatgaccatgttgctgagattgaagagaagaatgcagctgccatagatagcgaagggtggcttcactctggtgacaagggagcaatttccacaaggggaatgctcaagataacgggcagatacaaggagcttatcataggtgctggtggggagaatgtggctcctgttcccattgaagatgccatcaaggcgaggatgccttttgtttcaaatgcaatgatggttggagacaagaggaagttcatggctgtccttctgactttgaaaacggttggagcaactggagagcttcctggcacaaacaagctcatgggagcagctgcggactatggtgagaccattgaggatgcctgtgacaatgaggcgctcattgaagagataacgcagcaactcaaagagataggtgacgatggagatgtcacgccaagcaatgcagcccgtatacaaaagttcacgattttgccactcgacttcagtgtctccacagatgaactgacagcaacgttgaaattgaagagaagtgtggttgcagacaagtatgaggacatcatagaggctttctatgagagcaagtctgtctttgtgccttactcaacagttggagcttatgcaacgggtggaccagttgatgactctgttgtggatggatcattcaaaggtgactttagcatgattggggatgacgatccggatcttcagaatgtggatgtccttgaagcaattgatgaggacaactgagtagttagcttaatcacttaggtcacctcgagtatcaaaatctatttagaaatacacaatattttgttgcaggcttgctggagaatcgatctgctatcataaaaattacaaaaaaattttatttgcctcaattattttaggattggtattaaggacgcttaaattatttgtcgggtcactacgcatcattgtgattgagaagatcagcgatacgaaatattcgtagtactatcgataatttatttgaaaattcataagaaaagcaaacgttacatgaattgatgaaacaatacaaagacagataaagccacgcacatttaggatattggccgagattactgaatattgagtaagatcacggaatttctgacaggagcatgtcttcaattcagcccaaatggcagttgaaatactcaaaccgccccatatgcaggagcggatcattcattgtttgtttggttgcctttgccaacatgggagtccaaggttggcgcgccgaattcgcggccgcttaattaatctgatcatggatgctacgtcacggcagtacaggactatcactagacctaggatctgcttttacatgcgagacacatcttctaaagtaattttaataatagttactatattcaagatttcatatatcaaatactcaatattacttctaaaaaattaattagatataattaaaatattacttttttaattttaagtttaattgttgaatttgtgactattgatttattattctactatgtttaaattgttttatagatagtttaaagtaaatataagtaatgtagtagagtgttagagtgttaccctaaaccataaactataagatttatggtggactaattttcatatatttcttattgcttttaccttttcttggtatgtaagtccgtaactggaattactgtgggttgccatgacactctgtggtcttttggttcatgcatggatcttgcgcaagaaaaagacaaagaacaaagaaaaaagacaaaacagagagacaaaacgcaatcacacaaccaactcaaattagtcactggctgatcaagatcgccgcgtccatgtatgtctaaatgccatgcaaagcaacacgtgcttaacatgcactttaaatggctcacccatctcaacccacacacaaacacattgcctttttcttcatcatcaccacaaccacctgtatatattcattctcttccgccacctcaatttcttcacttcaacacacgtcaacctgcatatgcgtgtcatcccatgcccaaatctccatgcatgttccaaccaccttctctcttatataatacctataaatacctctaatatcactcacttctttcatcatccatccatccagagtactactactctactactataataccccaacccaactcatattcaatactactctaggatccacaaccaaaaatgcttcagcacacttggcttccgaagcctcccaatctgaccctcttgtcagatgaggttcatctctggaggattcctcttgaccagcctgagtcacaacttcaagaccttgctgccaccctgagcagtgatgaattggcgagggcaaacagattctactttccagaacacagaaggcgtttcactgctgggagaggcatcctcagatccatcttgggtggatacttgggagtggaaccgggtcaagtcaagtttgattatgagtcccgtgggaaaccgatccttggtgacagatttgctgagagtggactcctgttcaacttgtctcacagccagaaccttgccttgtgtgctgtcaactacacgcgtcaaataggcattgatcttgaatatctgcgtccaacatctgacttggagtctcttgcaaagaggttctttctcccaagagaatatgaactcttgaggtcactccctgatgagcagaaacagaagattttctttcgttactggacttgcaaagaggcttatctcaaagcaacgggagatggaatagccaaacttgaagagatcgagatagcactcaccccaacagaacctgccaagctccaaacagctcctgcgtggtctctgttggagcttgtgccagatgacaattgtgttgcagctgtggctgttgcgggttttggttggcagcccaagttctggcattactgagtagttagcttaatcacttaggtcacctcgagtatcaaaatctatttagaaatacacaatattttgttgcaggcttgctggagaatcgatctgctatcataaaaattacaaaaaaattttatttgcctcaattattttaggattggtattaaggacgcttaaattatttgtcgggtcactacgcatcattgtgattgagaagatcagcgatacgaaatattcgtagtactatcgataatttatttgaaaattcataagaaaagcaaacgttacatgaattgatgaaacaatacaaagacagataaagccacgcacatttaggatattggccgagattactgaatattgagtaagatcacggaatttctgacaggagcatgtcttcaattcagcccaaatggcagttgaaatactcaaaccgccccatatgcaggagcggatcattcattgtttgtttggttgcctttgccaacatgggagtccaaggttggcgcgccgaattcgcggccgcttaattaactactgtcactgaggccgtagacgagtacggactgatctaactagtgctagcctcgaggtcgacacccagcttt

SEQ ID NO: 57 - DNA, 36936 bp, Artificial sequence
  plasmid pDAB7733
gatctgcttttacatgcgagacacatcttctaaagtaattttaataatagttactatattcaagatttcatatatcaaatactcaatattacttctaaaaaattaattagatataattaaaatattacttttttaattttaagtttaattgttgaatttgtgactattgatttattattctactatgtttaaattgttttatagatagtttaaagtaaatataagtaatgtagtagagtgttagagtgttaccctaaaccataaactataagatttatggtggactaattttcatatatttcttattgcttttaccttttcttggtatgtaagtccgtaactggaattactgtgggttgccatgacactctgtggtcttttggttcatgcatggatcttgcgcaagaaaaagacaaagaacaaagaaaaaagacaaaacagagagacaaaacgcaatcacacaaccaactcaaattagtcactggctgatcaagatcgccgcgtccatgtatgtctaaatgccatgcaaagcaacacgtgcttaacatgcactttaaatggctcacccatctcaacccacacacaaacacattgcctttttcttcatcatcaccacaaccacctgtatatattcattctcttccgccacctcaatttcttcacttcaacacacgtcaacctgcatatgcgtgtcatcccatgcccaaatctccatgcatgttccaaccaccttctctcttatataatacctataaatacctctaatatcactcacttctttcatcatccatccatccagagtactactactctactactataataccccaacccaactcatattcaatactactctaggatccacaaccaaaaatggcagcgaggctgcaagagcagaaaggaggtgagatggacacgaggattgcgatcataggcatgagcgccatacttccttgtggaaccacggtgagagagtcatgggagaccataagggctggcattgattgcctgtctgatcttcctgaggatcgtgttgatgtgactgcgtactttgacccagtcaagaccacaaaggacaaaatctactgcaagagaggaggtttcattcctgagtatgactttgatgcgcgtgagtttggtctcaacatgttccagatggaagattctgatgcgaatcagaccatctcacttctcaaggtcaaagaagcacttcaagatgctgggattgatgcacttggaaaggagaagaaaaacataggatgcgtgcttggcattggaggtggacagaagagttcacatgagttctacagcagactcaactatgtggttgtggagaaagtcttgagaaagatggggatgccagaggaagatgtcaaagtggctgtggagaagtacaaagcgaacttcccagaatggagacttgactctttccctggattccttgggaatgtcactgctggcagatgcaccaacacattcaacttggatggcatgaactgcgttgtggatgctgcatgtgcaagctccttgatagcagtcaaggttgcgattgatgaactgctctatggtgactgcgacatgatggtcactggtgcaacctgcacagacaactccattgggatgtacatggctttctcaaagacacctgtgttcagcacggacccaagtgtgagagcgtatgatgagaaaacgaaagggatgctcattggtgagggatcagccatgttggtgctcaaacgttatgcagatgcagtgagggatggtgatgagattcatgctgtgattcgtggttgtgcaagctcaagtgatggcaaagcagctggcatctacactcccacaatcagtggtcaagaggaagccttgagacgtgcatacaatcgtgcctgcgttgaccctgccactgtcactttggttgagggtcatgggactggcactccagttggagataggattgagttgactgcgttgaggaacttgtttgacaaagcgtatggtgaagggaacacagagaaagttgcagttggaagtatcaagtccagtattggtcatttgaaggctgttgctggtcttgctggaatgatcaaggtcatcatggctctcaaacacaagactttgcctggaacgatcaatgtggacaatccacccaatctctatgacaacactcccatcaatgagtcatccctctacatcaacacgatgaacagaccctggttccctccacctggtgttccgagacgtgctggaatatccagctttggctttggaggtgccaactaccatgcagtgttggaagaggctgaaccagagcacacgacagcgtacagactcaacaaacgtccacaaccggtgttgatgatggctgcaactcctgctgcgttgcagagcctttgtgaagctcagctgaaagagtttgaagctgcgatcaaggagaatgagacagtcaagaatactgcctacatcaagtgtgtcaagtttggagaacagttcaagttccctgggagcatacctgcgaccaatgcgagactgggattcttggtcaaagatgcggaggatgcgtgctccacgcttcgtgctatatgtgctcagtttgccaaagatgtgaccaaagaagcgtggaggcttccgagagaaggagtttctttccgtgccaaaggcattgccaccaatggtgctgttgctgcactcttctctggacaaggtgctcagtacacacacatgttcagtgaagttgcgatgaactggcctcagttcagacagtccattgctgcaatggacgctgcacagtccaaggttgctggaagtgacaaagactttgaaagagtctctcaagtcctgtacccaaggaaaccgtacgaacgtgagccagaacaagatcacaagaaaatctcactcacagcatacagccagccgtcaaccctggcatgtgctcttggtgcctttgagattttcaaggaagctggattcactccagactttgcagctggacacagcttgggtgagtttgctgcgctctatgcagctggttgtgttgacagagatgagttgtttgaacttgtttgcagaagggcaaggatcatgggaggcaaagatgcacctgccacacccaaaggttgcatggcagctgtcataggacccaacgcagagaacatcaaggttcaagctgccaacgtctggcttggaaactcaaactctccgtctcagactgtcattactgggtctgttgaagggattcaagctgaaagtgccagattgcagaaggaagggttcagagttgtgcctcttgcttgtgagtctgccttccattctccacagatggaaaatgccagctcagctttcaaagatgtcatatccaaggtttccttccgtacacccaaagcagaaacaaagctcttcagcaatgtttctggagagacctatccgacggatgccagagagatgctcactcaacacatgacctcatctgtgaagttcctgacccaagtgaggaacatgcaccaagctggtgcgagaatctttgttgagtttggaccgaaacaagttctcagcaaacttgtttctgaaaccctcaaagatgacccgtctgttgtcacagtgtctgtgaacccagcttctggcacggactctgacatacagttgagggatgctgcagttcagctggttgtggctggtgtcaatcttcaagggtttgacaagtgggatgctcctgatgccacgaggatgcaagccatcaagaaaaagagaaccacactcagactttcagctgccacctatgtcagtgacaagaccaagaaagtgagggatgctgccatgaacgacggaagatgtgtcacatacctcaagggtgctgcaccactcatcaaggctcctgaacctgtggttgacgaagctgccaagagggaggctgaaaggcttcagaaggagcttcaagacgctcagaggcagcttgacgacgccaaacgtgcagctgcagaagccaactccaaacttgctgctgccaaggaggaagccaagactgctgcagcttcagccaagcctgcagttgacactgctgttgtggagaaacatcgtgccatcctcaagtccatgctggctgagctggatggttatggaagtgttgatgcttcttcccttcagcaacagcaacagcaacagactgctccggcgcctgttaaagccgctgcccctgccgctcccgttgcaagtgctcctgctcccgccgtgtccaacgagttgcttgagaaagctgagacagttgtgatggaggttctcgctgccaagactggatacgaaacagacatgattgaggcggacatggagcttgagactgagttgggaattgacagcatcaagagggttgaaattctttctgaagtccaagctatgcttaacgttgaggcgaaagatgttgatgctctctctaggacgagaacagtgggtgaagttgtcaacgctatgaaggcagaaatcgctggttcttccgctccggcgccggcagctgccgcacctgcaccggctaaagcggctccagctgcagctgcaccagctgtttctaatgagctgctcgaaaaggcagaaactgttgtgatggaagtccttgctgccaaaactggctacgaaactgacatgatagaatcagacatggagcttgagacggagcttggaattgattccatcaagcgtgtggaaatcctcagtgaagtccaagccatgctcaatgtggaagctaaggatgtggatgctctctcaaggaccagaactgtcggtgaggttgtcaatgccatgaaggctgagatagctggaggctccgctcctgcgccggccgctgccgctcctggtcccgctgccgcggctccagctccagctgcagccgctccggccgtctcaaacgaactccttgaaaaagctgagaccgtcgtgatggaggtcttggcagctaaaaccggctatgagactgacatgattgagtctgacatggaattggagacagaacttgggatagacagcatcaaacgtgttgaaatcctcagtgaggtccaagctatgctgaacgtggaagcgaaggatgttgatgctctgtccagaacgaggaccgttggtgaggttgtggatgccatgaaggctgaaattgctggagggtctgcgcccgcgccagctgcagccgctcctgcacccgcagccgcggcacctgctccagctgcacctgcacctgccgtttcttcagaactcttggagaaggctgagacggttgtgatggaggttttggctgcaaagactggctatgagaccgacatgattgaatctgatatggaattggagacagagcttgggatcgattccatcaaaagagtggagatcctgagtgaagtccaagccatgctcaatgttgaagctaaggatgttgatgcactttcaagaacaaggacagtgggtgaggttgtggatgccatgaaggcggagattgctggagggagcgcgcctgcgccagctgccgcggcacctgcaccggcagccgcagctccagctccagctgcaccagcaccggccgcgcccgcgccagctgtttcatccgaactcctggaaaaggccgagacggttgtgatggaggtgctcgcagctaagactggttacgagaccgacatgattgaaagtgacatggagcttgaaaccgagttgggaatagatagcatcaaacgtgttgaaatcttgtctgaggtccaagctatgttgaacgtggaggcaaaagatgtcgatgcgctttcaagaaccagaacagtcggtgaggtcgtggacgccatgaaggctgaaattgccggaagctctgctagtgcgccagctgcagccgcacctgcacctgctgccgcggcacctgctccagctgcagccgctcctgccgtcagcaatgagttgctggagaaagccgaaacagttgtgatggaagtccttgctgcaaaaactggttacgaaacggacatgattgagtcagacatggaattggagaccgaacttggaatagattccatcaagagagtggagatcctctctgaggtgcaagccatgctcaacgttgaggctaaagatgttgatgcactcagtaggacaagaactgtgggggaagttgtcgatgcgatgaaggctgagattgctggaggctctgctcctgcgccggcagctgccgcacctgcacccgcagccgcggcaccagctgtcagcaacgaattgcttgagaaggctgaaacagttgtcatggaagtgctggctgcaaaaaccggctatgagactgacatgattgagtctgacatggaacttgagacggaattgggcattgacagcatcaagcgtgttgagatcctcagtgaagtccaagcaatgctcaatgtggaggctaaggatgtggatgccctctcaaggaccagaacagttggtgaggtcgttgatgcgatgaaggcggagatcgctggaagttccgcgcctgcgccagctgcagccgctcctgcacccgcagccgcggcaccggctccagctgcagccgcaccggccgtctcctcagaactcctggaaaaggctgagacagttgtgatggaagtccttgctgcgaaaactggctatgagaccgacatgattgaatctgacatggaactggagaccgagcttggaattgactccatcaaacgtgttgaaatcctctctgaggttcaagcgatgttgaatgtggaggccaaagatgttgatgctctttccagaacaaggacggtgggagaggtggttgatgccatgaaggctgagatagctgggggttctgctcctgcgccagctgcagccgctcctgctcccgctgccgcggcaccagctgtcagcaacgaactccttgaaaaagctgaaactgttgtgatggaggttttggctgcaaagactggatacgagactgacatgatagagtcagacatggagttggaaacagagcttgggattgatagcatcaagcgtgtggaaatcctttctgaggttcaagccatgctgaacgttgaggccaaagatgtcgatgctttgtcaaggaccagaacggttggagaagtggtcgatgccatgaaggctgagatagctggtggatcagcccctgctccggctgcagccgctcctgcaagtgccggtgctgcaccagctgtgaagattgattcagttcatggtgctgactgtgacgatttgtcactgatgcacgcaaaggtggttgacatcagaaggccagatgaactgattctggaaagaccggagaaccgtccagttcttgtcgttgacgatggctcagagttgacacttgctcttgtgagggtgttgggagcctgtgcagttgtcttgacctttgagggattgcagttggctcagagagctggtgcagctgccattcgtcatgttctggctaaggacctttcagcagaatcagctgagaaggccatcaaagaggctgagcaaagatttggagcgttgggaggcttcataagccagcaagcagaaaggtttgaaccagctgagatactgggtttcacactcatgtgtgcgaagtttgccaaagcctctctctgcactgctgtggctggaggtcgtcctgccttcatcggtgtggctaggcttgacggcagacttggattcacctctcaaggcacttctgacgcactcaagagagcacagcgtggagcgatctttggactctgcaagacaatagggttggagtggtcagaatctgatgtgttcagccgtggtgtggacattgctcaagggatgcacccagaagatgctgcagttgccatagttagggagatggcgtgtgctgacatcagaatcagagaggttgggattggagcaaaccagcaaagatgcacaatcagagctgccaagttggagactgggaaccctcagagacagatagcgaaagacgatgtgcttctggtttctggaggtgctcgtgggatcacacctctttgcatccgtgagatcacgcgtcagattgctggaggcaagtacattctgttgggtcgtagcaaagtttctgcgtctgaaccagcatggtgtgctggcatcactgatgagaaggctgtgcagaaagctgccacccaagagttgaagagggccttcagtgctggtgaaggacccaaacccactccaagggctgtcacgaaacttgtgggatctgttcttggtgctcgtgaagtgagaagctccattgctgccattgaagctctgggtggcaaagcgatctacagctcttgtgatgtgaactctgctgcagatgttgccaaagcagttagggatgcagagtcccagcttggtgccagagttagtggaatcgttcacgcttctggtgtgctccgtgatcgtctcatagagaagaaactccctgacgagtttgatgctgtctttgggaccaaagtcactgggttggagaatcttctggctgcagttgatcgtgccaacctcaaacacatggttctcttcagctcccttgctggtttccacggcaatgttggtcagtctgactatgcgatggcaaacgaagctctcaacaagatgggtttggaacttgcgaaggatgtcagtgtcaagtccatctgctttggtccctgggatggtgggatggtgacacctcaactcaagaaacagtttcaagaaatgggagttcagatcattcctcgtgaaggaggtgctgatacagttgcgaggattgtgttgggatcaagtcctgctgagatccttgttggaaactggaggacaccatccaagaaagttggaagtgacacgatcaccctgcatagaaagatcagtgccaagtccaatcccttcttggaggatcatgtcatacaaggcagaagggtgttgccaatgacccttgctattgggagccttgctgagacctgccttggactcttccctggctactctctctgggccatagatgacgcacagctcttcaaaggtgtcactgttgatggagacgtcaactgtgaagtgaccctcacaccgtccactgctccgagtgggagggtgaatgtccaagcgacgctcaagacgttctcaagtggaaaacttgttccagcctacagagctgtcatagtgttgtccaaccaaggtgctccacctgccaatgcaaccatgcagcctccgagccttgatgcagatcctgctttgcaagggtcagtctatgatggcaagactctctttcatggtcctgcgttcagaggcattgatgacgttctcagctgcaccaagagccagcttgttgccaagtgttctgctgttcctggatcagatgcagccagaggagagtttgcaactgacactgatgcacatgatccctttgtcaatgatcttgcctttcaagcaatgttggtctgggtgaggagaacgctgggacaagctgcactcccgaactccattcagaggatagtccaacacagaccggtcccacaagacaaacccttctacatcaccctcagatccaatcagagtggtggacatagccagcacaaacatgcacttcagttccacaacgaacaaggtgatctcttcattgatgttcaagcctctgtcattgcgacagactcacttgcgttctgagtagttagcttaatcacttaggtcacctcgagtatcaaaatctatttagaaatacacaatattttgttgcaggcttgctggagaatcgatctgctatcataaaaattacaaaaaaattttatttgcctcaattattttaggattggtattaaggacgcttaaattatttgtcgggtcactacgcatcattgtgattgagaagatcagcgatacgaaatattcgtagtactatcgataatttatttgaaaattcataagaaaagcaaacgttacatgaattgatgaaacaatacaaagacagataaagccacgcacatttaggatattggccgagattactgaatattgagtaagatcacggaatttctgacaggagcatgtcttcaattcagcccaaatggcagttgaaatactcaaaccgccccatatgcaggagcggatcattcattgtttgtttggttgcctttgccaacatgggagtccaaggttggcgcgccgaattcgcggccgcttaattaagatgagtgatactcaggactcaggactcactctgctgatcactagtgctagcctcgaggtcgacacaactttgtatacaaaagttgtctagacctaggttaattaagcggccgcagcttatttctcttttcgatactctaattgagccgtgcgctctatctagaccaattagaattgatggagctctaaaggttgctggctgttttcttgttcatatgattaacttctaaacttgtgtataaatattctctgaaagtgcttcttttggcatatgtaggttgggcaaaaacgaggaagattgcttctcaatttggaagatgatgaacagccgaagaagaaaataagaataggcagtcctgctactcaatggatctcagtctataacggtcgtcgtcccatgaaacagaggtaacacattttttgcatatacactttgatagttcctcactaactgtgtaatcttttggtagatatcactacaatgttggagagacaaggctgcgccagcatatacagaagggaaatgaagatggccttttgattagctgtgtagcatcagcagctaatctctgggctctcatcatggatgctggaactggattcacttctcaagtttatgagttgtcaccggtcttcctacacaaggtaataatcagttgaagcaattaagaatcaatctgatttgtagtaaactaagaagaacttaccttatgatttccccgcaggactggattatggaacaatgggaaaagaactactatataagctccatagcgggttcagataacgggagctctttagttgttatgtcaaaaggttagtgtttagtgaataataaacttattatcaaaaagtcttcattgacttatttatatacttgttgtgaattggtaggaactacttattctcagcagtcatacaaagtgagtgactcatttccattcaagtggataaataagaaatggaaagaagattttcatgtaacctccatgacaactgctggtaatcgttggggtgtggtaatgtcgaggaactctggcttctctgatcaggtaggtttttgtctcttattgtctggtgtttttattttcccctgatagtctaatatgataaactctgcgttgtgaaaggtggtggagcttgactttttgtacccaagcgatgggatacataggaggtgggagaatgggtatagaataacatcaatggcagcaactgcggatcaagcagctttcatattaagcataccaaagcgtaagatggtggatgaaactcaagagactctccgcaccaccgcctttccaagtactcatgtcaaggttggtttctttagctttgaacacagatttggatctttttgttttgtttccatatacataggacctgagagcttttggttgaattttttttttttcaggacaaatgggcgaagaatctgtacattgcatcaatatgctatggcaggacagtgtgctgatgatacacacttaagcatcatgtgttgtgttagaaagccgaagacaattggagcgagcctcagggtcgtcataataccaatcaaagacgtaaaaccagacgcagtctctttggttgaatgtgatgaaagggatgtgtcttggtatgtatgtacgagtaacaaaagagaagatgcaattgagtagtagaaagatttgagagctttttaaagcccttcaagtgtgtgcttttatcttattgatatcatccatttgcgttgtttaatgcgtctttagatatgtttctgtttctttctcagtgtctgaatatctgataagtgcaatgtgagaaagccacaccaaaccaaaatattcaaatcttatatttttaataatgtcgaatcactcggagttgccaccttctgtgccaattgtgctgaatctatcacactaaaaaaaacatttcttcaaggtaatgacttgtggactatgttctgaattctcattaagtttttattttttgaagtttaagtttttaccttcttttttgaaaaatatcgttcataagatgtcacgccaggacatgagctacacatcacatattagcatgcagatgcggacgatttgtcactcacttcaaacacctaaaagagcttctctctcacagcacacacacatatgcatgcaatatttacacgtgatcgccatgcaaatctccattctcacctataaattagaggctcggcttcactttttactcaaaccaaaactcatcactacaagatccacaaccaaaaatggctgcaaggaacgtgagtgcggctcatgagatgcatgacgagaagaggatagctgttgtgggcatggctgttcagtatgctggatgcaaaacgaaagacgagttctgggaagttctcatgaatggaaaagttgagagcaaagtgatcagcgacaaacgtcttggttcaaattaccgtgctgaacactacaaagctgaaaggagcaagtatgctgacaccttctgcaatgagacatatggaactcttgatgagaacgaaatagacaatgagcatgaactccttttgaaccttgccaaacaagccttggctgaaacatctgtcaaagattcaacaagatgtggcatagtttctggatgcctcagcttcccgatggacaacctccaaggtgaactcttgaatgtgtaccagaaccatgttgagaagaaacttggtgccagagttttcaaagatgcctctcactggtcagaaagagaacagtccaacaaaccagaggctggtgacagaagaatcttcatggaccctgcttcctttgttgctgaggaactcaatcttggcgctctccactactctgttgatgctgcctgtgccactgcgctctatgtgctcagactggcgcaagatcacttggtctctggtgcagctgatgtgatgctttgtggtgcaacatgcctgccggagccgtttttcatactctctgggttctcaaccttccaagccatgcctgttggaacgggtcagaatgtgtccatgccgctgcacaaagattctcaaggattgacccctggtgaaggaggttccatcatggtcctcaaacgtttggatgacgcaatcagagatggagatcacatctatggaacacttttgggagccaatgtcagcaacagtggcactggtctgccacttaaaccccttttgccgtcagagaaaaagtgcctcatggacacctacacacgtatcaatgtgcatccccacaagattcagtatgttgaatgccatgcaactgggactccacaaggtgatcgtgtggaaattgatgctgtgaaggcttgctttgaaggcaaagtcccacgttttggaaccacaaaagggaactttggacacacattggtggcagctgggtttgctggcatgtgcaaagtgcttctctccatgaagcacgggatcattccacccactccgggaatagatgacgaaacgaagatggaccctctggttgtctctggtgaggccattccctggccagaaacgaatggagaaccgaagcgtgctggtctctcagcgtttggatttggtgggaccaatgctcatgctgtctttgaggaacatgacccaagcaatgctgcatgcactggccatgactccatttctgctctctctgcacgttgtggtggtgagtcaaacatgagaatagcaatcactgggatggatgccacttttggtgctttgaaaggattggatgcttttgaaagggccatctacactggtgctcatggtgctataccactcccagaaaagagatggagattcctggggaaagacaaggacttccttgatctttgtggagtcaaagcaacaccgcatggctgttacattgaagatgttgaagttgatttccagaggctgaggactccaatgactcctgaagatatgctcttgcctcaacagcttctggctgtcaccacaattgatagggccatattggactctggcatgaagaaaggtggaaatgtggctgtctttgtggggttggggaccgatcttgaactctaccgtcaccgtgcaagggttgctctcaaggagagagtgaggcctgaagccagcaagaaactcaatgacatgatgcagtacatcaatgattgtgggacaagcacttcttacaccagctacataggcaacttggttgcaacaagggtcagttcacaatggggcttcacgggaccttccttcacaatcacagaaggcaacaattctgtgtacagatgtgctgaacttggcaaatacctcttggaaacgggagaggttgatggggttgtggttgcgggtgttgatctctgtgggagtgctgagaacctttacgtcaagtcaaggcgtttcaaggtgtctacatctgacaccccgagagccagctttgatgcagctgctgatggttactttgttggagagggctgtggtgcatttgtgctcaagcgtgagacaagctgcaccaaggatgacagaatctatgcttgcatggatgccatagttcctggaaatgttccatctgcatgtttgagagaggcattggatcaagccagagtcaagcctggagacatcgagatgttggagctttctgctgattcagcgaggcatttgaaggacccgtctgttctcccaaaggaactcactgctgaggaagagattggcggacttcagacgattcttcgtgacgatgacaagctcccaaggaatgttgcaactggaagtgtcaaggccactgttggtgacactggttatgcttctggtgctgccagtttgattaaggctgcgctttgcatctacaaccgttacctgcccagcaatggagatgactgggatgaacctgcacctgaagcaccctgggacagcacactctttgcgtgccagacctcaagagcttggttgaagaaccctggtgagagacgttatgcggctgtttccggagtcagtgaaaccagaagttgctacagtgtgctgctttctgaagcagagggacactacgagagagagaacagaatcagtttggatgaggaagcacccaagctcattgtgttgagagcagactcccatgaagagattcttggaagattggacaagataagggaaaggttcttgcagcccacgggtgctgcacccagagagtctgaattgaaggcgcaagcccgtaggatctttcttgaactccttggtgagacccttgcccaagatgcagcttcatctggaagtcagaagccccttgctctcagcttggtctccactccatccaagctccagagagaggtggaacttgcggcaaaaggcattccgagatgtctcaagatgagacgtgattggagttcccctgctggaagcagatatgcgcctgagcctttggccagtgacagagttgccttcatgtatggagaaggaaggagcccttactatggcatcacacaagacattcataggatttggcctgaacttcatgaggtcatcaatgagaaaacaaaccgtctctgggctgaaggtgacagatgggtcatgccaagggccagcttcaagagtgagcttgagtcacaacagcaagagtttgacagaaacatgattgaaatgttccgtcttggaatcctcacctcaattgccttcacaaacctggcgagagatgttctcaacatcacgcccaaagcagcctttggactcagtttgggagagatttccatgatctttgctttctccaagaaaaacggtttgataagcgatcagttgacaaaggatttgagagagtcagatgtctggaacaaagctctggctgttgagttcaatgcgctcagagaagcctggggcattccacagtctgtcccaaaagatgagttctggcaaggttacatagtgaggggaacgaaacaagacatagaagcagccatagcaccagactcaaagtatgtgaggttgaccatcatcaatgatgccaacactgctctcatcagtggaaagcctgatgcatgcaaagctgcgattgctcgtcttggtggcaacatccctgcgcttccagtcactcaaggcatgtgtgggcattgcccagaggtgggaccttacaccaaggacatcgcaaagatccacgccaaccttgagttccctgtggttgatggtcttgatctctggactaccataaaccagaagaggcttgtgccaagagccacgggtgccaaagatgaatgggctccttcatcctttggggagtatgctggacagctctatgagaaacaagccaacttccctcagatagttgaaaccatctacaagcagaactatgatgtgtttgttgaagttgggccaaacaatcacagaagcacagcagtgagaaccacgcttggaccacagagaaaccaccttgctggtgccatagacaagcagaacgaggatgcttggacgacaatagtcaagctcgtggcttcattgaaggctcaccttgttcctggagtgaccatcagtccgctctaccactccaagctcgttgcagaggctgaggcttgttatgctgcgctctgtaaaggtgagaaacccaagaaaaacaagtttgtgagaaagattcagttgaatggcagattcaacagcaaggcagaccccatctcctcagcagaccttgcatccttcccacctgcggaccctgcgattgaagctgccatctcttcaaggatcatgaagcctgtggctccgaaattctatgcgcgtctcaacattgatgagcaagatgagaccagagatccgatcttgaacaaggacaatgcgccttccagctccagctcttccagcagttcctcttccagcagttcatctccgtctcctgctccttcagctccagttcagaagaaagctgccccagctgcggagacaaaagctgttgccagtgctgatgcacttcgtagtgccctgcttgatcttgactccatgcttgcgctcagctctgcaagtgcttctggcaaccttgttgagactgcgccatctgatgccagtgtcattgtccctccgtgcaacattgctgatcttggcagcagagctttcatgaaaacttatggtgtttctgcgcctctgtacaccggtgcaatggccaagggaattgcctctgcggacttggtgatcgcagctggaaggcaaggaatccttgcgtcatttggtgctggaggccttccaatgcaagttgtgcgtgagtccattgaaaagattcaagctgccctgcccaatggaccatatgctgtcaacctcatccattctccttttgacagcaaccttgagaagggaaatgttgatctcttcttggaaaagggtgtcacttttgttgaggcttcagccttcatgacgttgacaccgcaagttgtcagatacagagcggctgggttgacgaggaatgcagatgggtcagtcaacataaggaacagaatcattgggaaagtctccagaactgagctggctgaaatgttcatgcgtcctgcacctgagcatcttttgcagaagctcattgcttctggggagatcaatcaagaacaagctgagttggccagacgtgttcctgtggctgatgacattgcggttgaagctgattctggtggacacactgacaaccgtccaatccatgtcattctgcctctgattatcaacctgagggataggcttcacagagagtgtggatacccagcaaacctgagggttcgtgttggtgctgggggtggcattgggtgtccccaagctgcgctggcaactttcaacatgggtgcctctttcattgtcactggaacagtgaaccaagttgccaaacaatctgggacgtgtgacaatgtgaggaaacagcttgcgaaagcaacttactcagatgtttgcatggcaccggcagctgacatgtttgaggaaggtgtgaaacttcaagttttgaagaaaggaacaatgttcccttcaagagccaacaaactctatgagttgttctgcaagtatgattcttttgagtccatgcctccagcagagcttgcgagggttgagaaaagaatcttcagtcgtgcattggaagaggtctgggatgagaccaagaacttctacatcaaccgtctccacaacccagagaagatacagagggctgagagggaccccaaactgaagatgtcactgtgtttcagatggtatctgtccctggcttcaaggtgggccaacactggagcttctgacagagtcatggactaccaagtttggtgtggtcctgccattggttcattcaatgatttcatcaaaggaacttaccttgatccggcagtggcaaatgagtacccgtgtgttgtgcagatcaacaaacagattcttagaggagcgtgcttcttgaggcgtcttgaaatactgagaaatgcaaggctttcagatggtgcagctgcacttgtggcgagcattgatgacacatatgtccctgctgagaagctgtgagtagttagcttaatcacttaggtcaccattccaaacgaaatatcctcgagagtgtgtataccacggtgatatgagtgtggttgttgatgtatgttaacactacatagtcatggtgtgtgttccataaataatgtactaatgtaataagaactactccgtagacggtaataaaagagaagtttttttttttactcttgctactttcctataaagtgatgattaacaacagatacaccaaaaagaaaacaattaatctatattcacaatgaagcagtactagtctattgaacatgtcagattttctttttctagatgtctaatcaagccttcaaggctagtgataaaagatcatccaatgggatccaacaaagactcaaatctggttttgatcagatacttcgaaactatttttgtatgcactaaattatgcaagtgttcttttatttggtgaagactctttagaagcaaagaacgataagcagtaataaaaaaaataaagttcagttttaagatttgttattgacttagcggccgcttaattaaactagtgctagcctcgaggtcgaccaacttttctatacaaagttgtctagacctaggactaggcactgagtgactcactgacctgactgagtgactggcggccgcagcttatagtaaagatttttttgttaataaaatgaaagttaatatttatggatttatttgaacatatttacaagtttttgttaataaatttatttacagaagtgttaaatttgaaaatgtgttaaatgagagttaatatttatggatataatattactttatttaaaaataaaatgaatttatattaaaatatgatttggtaaaagatattataaagaggaacttggatgagaaagacgacgatgggcaaaagttgcatggcacaccgcttttgttcagtaacatctgcactgtggcgcctttttcacactcaccatgcatgctgccacgtcagctttcacactatgacaccactggccatacacgttgccacctcagctttctcctcttctcactatgacacgactggccatgcatgcatgcatgctgccacctcagctcccgcctcttcacccgtgtctttctctcatgtcgcagtgctgcgtgccaacctcttctctctataaatagagagaagagaatgatggttaaactcaaaccaaaacaagaaaacatacacaaatagcaaaacggatccacaaccaaaaatggcgcttcgtgtcaagaccaacaagaagccatgttgggagatgaccaaggaggaactgacctctggcaaaactgaggtgttcaactatgaggaactcctggagtttgcagagggtgacatagctaaggtttttggtccggagtttgctgtcatagacaagtaccccagaagggtgaggctgcctgctcgtgaatacctgcttgtgacaagggtcacactcatggatgccgaggtcaacaactacagagttggtgccagaatggtcactgagtatgatcttccagtgaatggcgaattgtctgagggaggtgattgtccctgggcagttctggttgagagtggacagtgcgatttgatgctgatatcatacatgggaattgatttccagaaccaaggtgacagagtttaccgtctgctcaacaccacgttgacattctatggggttgcccatgagggagagacccttgagtatgacatcagagtgaccggttttgccaaacgtttggatggtggcatctccatgttcttctttgagtatgactgctatgtcaatgggaggcttctcattgagatgagagatggctgtgctggcttcttcacaaatgaggagcttgatgcgggaaagggtgtggtgttcacaagaggggatttggctgccagagctaagattccaaagcaagatgtttctccctatgctgtcgctccctgccttcacaaaacaaaactcaacgaaaaggagatgcagaccttggttgacaaagattgggcttccgtttttggctcaaagaatggcatgccggagatcaactacaaactctgcgcacgtaagatgctcatgattgatagagtcaccagcattgaccataagggaggtgtgtacggtttgggtcagttggttggtgagaaaatcttggagagggaccattggtacttcccatgccattttgttaaggatcaagtcatggctggatctcttgtcagcgacggttgttcacaaatgctcaagatgtacatgatctggctcggtttgcaccttaccaccggaccatttgacttcagacccgtcaacggacacccgaacaaagttaggtgtaggggtcagatatctcctcataagggaaagttggtctacgtcatggagatcaaagagatgggattcgacgaggataacgatccgtacgccattgctgacgtcaacatcattgacgttgatttcgaaaagggtcaagatttcagccttgatagaatcagcgactacggaaagggggatcttaacaaaaagatcgtcgtggacttcaagggcattgctctcaagatgcagaagagatccacgaacaagaacccctccaaagttcagcccgtttttgctaacggtgcagccactgtgggaccggaagcgtccaaggccagctctggtgccagtgctagtgcttctgctgcccctgcgaagcctgctttctcagcagatgttcttgcgccaaagccagttgcacttcctgaacatatcctcaagggtgacgctctcgctccgaaagaaatgtcctggcatcccatgtcaaaacttcctggcaacccgacgccgttcttctcccctagttcttaccctccgagggcaatttgcttcatccctttccctggcaacccacttgacaacaattgcaaagctggagaaatgcctctgaactggtacaacatgtcagagttcatgtgtggaaaagttagcaactgcttgggaccagagttcgcaagatttgataagtcaaatacgagcagaagccctgcttttgatttggctcttgtgactagagttgttgaagtcacaaacatggaacatggcaagttcctgaatgttgattgcaatcccagcaaaggcacaatggtgggggagtttgactgtcctcaagatgcgtggttctttgatggttcttgcaatgatgggcacatgccttattccatcatcatggaaatcggacttcagacatccggtgttctcaccagtgtgttgaaagcaccactgacgatggacaaagatgacattctctttaggaaccttgatgcaagtgctgaaatggtgaggccagatgtggatgtgagggggaaaaccataaggaatgtgaccaagtgcactggatatgcaatgttgggaaagatggggattcacagattcacgtttgagttgtctgttgatggcgtggttttctacaaaggaagcacttcctttggatggttcactccagaggtgtttgctcagcaagctggacttgacaatgggaaaaagacggagccttggtgcaaaactaacaacacgagtgtgagaagagttgaaatcgcatcagccaaaggcaaagaacagctgactgagaaacttccagatgcaactaatgctcaagttctcagaaggtcagaacagtgtgagtatttggattacctcaacattgctcctgattctgggctgcatgggaaaggatatgcgcatggacacaaagatgttaacccacaagactggttcttctcttgtcacttttggtttgatcctgtgatgcctggatctttgggaattgagtcaatgttccagctcattgaggcatttgcggtggaccagaacataccgggagaatacaatgtgagcaatccgacctttgcccatgcccctggaaaaacggcgtggaagtaccgtggtcaattgacaccaaagaaccgtgcgatggactgtgaggtgcacatagtttcaatcacagcctctcctgaaaatggaggctacgttgacatagtggcagatggagcactttgggttgatggtctccgtgtgtatgaagccaaagaactcagagttcgtgttgtcagtgcaaaacctcaagccattccggatgttcaacaacagccacccagcgcaaaagcggaccctgggaaaactggagttgcactcagtccgactcagttgagagatgtcctgcttgaagtggacaatccattgtatcttggtgttgaaaactccaatttggtgcagtttgaatccaaacctgcaacttcttcaaggattgtcagtatcaaaccatgctccataagtgatcttggtgacaagtccttcatggaaacgtacaatgtgtcagcacctctgtacactggagcaatggccaagggaattgcgtctgcggaccttgtcattgctgctgggaagaggaagatattgggttcttttggagcgggtgggcttccaatgcaccatgtgagggcagctttggagaagatacaagcggctctgcctcaaggaccatatgctgtgaacctcattcattcaccttttgacagcaacttggaaaaggggaatgttgatctcttcctcgaaaagggcgttactgtggtggaggcttctgcattcatgaccctcactccccaagttgttcgttaccgtgcagccggactctcaaggaacgctgatgggagtgtcaacatcagaaaccgtatcattggaaaagtgtccagaacagaactcgccgaaatgttcatcagaccggctccggaacacctccttgagaaactcatagcttctggtgagataacacaagaacaagccgaacttgcccgtcgtgttcctgtcgcagacgacatcgctgttgaagctgattctggtggtcacactgacaaccgtcccatccacgtcatcttgcctttgatcatcaaccttaggaacagactgcacagagagtgtggttatcctgcgcaccttagagtcagagttggagctggaggcggtgttggctgcccacaagctgctgcggctgccctcacaatgggagctgccttcatagtgactgggactgtcaatcaagttgctaaacagtccgggacatgtgacaacgtgagaaaacaactcagtcaagccacctacagtgacatttgcatggctccagcagctgatatgtttgaggaaggtgtgaaactccaagttctcaagaagggaacaatgttcccatcaagagctaacaaattgtacgaactcttttgcaagtacgactctttcgattcaatgcctcctgctgaacttgaaaggatcgagaagaggatcttcaagagggcacttcaagaggtctgggaagagaccaaggacttttacatcaatggtttgaagaatccagagaagatacagagagcggaacatgaccccaaactcaagatgtctttgtgtttcagatggtatcttggtcttgcatcacgttgggccaacatgggtgctcctgatcgtgtcatggactatcaagtctggtgtggtccagccattggagccttcaatgacttcatcaaaggaacatatcttgatcctgctgtctctaatgagtacccatgtgttgtccagatcaaccttcagattttgcgtggtgcatgttacctgaggcgtcttaatgctctgagaaatgatccgaggattgatcttgagactgaagatgctgcctttgtctatgagccaacgaatgcgctttgagtagttagcttaatcacttaggtcacccagtccaagcccggcctagcacgatgatcatgagtgttgctattgatgtatgttaatactatacacagtcatcgtgtgtgttttataaaactgtaagcttaggatgtttgaggctaatgtaattagcactacaccgtaataaatgagaggtttactttatgttttaataatgttcttacccttgctgctctctaaactgtaatggcgtacggttagctaaactaaagtaaaaatcgattcgcttgagtaaaattagtgaccgggaaagatcatcgactactactgctcagagatgtaatcggtaattaagacttcaagctcaataattaattaggagtaaatctggcttcgaatttttaaattgtcaacttccaaagaaggattggcaagactcaatctcaattgcccaacaaacatatggctctttacaaatttggaatctctttttgatggcaagaacgtcgtaattcctctgtcgatctcatgtaattaccaaactcatctacttattactttctttatatgcacttactgatgcggccgcttaattaatcacgagtggatgactgtcacgactgactcatgactgactactagtgctagcctcgaggtcgacacaactttgtataataaagttgtctagtctgcttttacatgcgagacacatcttctaaagtaattttaataatagttactatattcaagatttcatatatcaaatactcaatattacttctaaaaaattaattagatataattaaaatattacttttttaattttaagtttaattgttgaatttgtgactattgatttattattctactatgtttaaattgttttatagatagtttaaagtaaatataagtaatgtagtagagtgttagagtgttaccctaaaccataaactataagatttatggtggactaattttcatatatttcttattgcttttaccttttcttggtatgtaagtccgtaactggaattactgtgggttgccatgacactctgtggtcttttggttcatgcatggatcttgcgcaagaaaaagacaaagaacaaagaaaaaagacaaaacagagagacaaaacgcaatcacacaaccaactcaaattagtcactggctgatcaagatcgccgcgtccatgtatgtctaaatgccatgcaaagcaacacgtgcttaacatgcactttaaatggctcacccatctcaacccacacacaaacacattgcctttttcttcatcatcaccacaaccacctgtatatattcattctcttccgccacctcaatttcttcacttcaacacacgtcaacctgcatatgcgtgtcatcccatgcccaaatctccatgcatgttccaaccaccttctctcttatataatacctataaatacctctaatatcactcacttctttcatcatccatccatccagagtactactactctactactataataccccaacccaactcatattcaatactactctaggatccacaaccaaaaatgcttcagcacacttggcttccgaagcctcccaatctgaccctcttgtcagatgaggttcatctctggaggattcctcttgaccagcctgagtcacaacttcaagaccttgctgccaccctgagcagtgatgaattggcgagggcaaacagattctactttccagaacacagaaggcgtttcactgctgggagaggcatcctcagatccatcttgggtggatacttgggagtggaaccgggtcaagtcaagtttgattatgagtcccgtgggaaaccgatccttggtgacagatttgctgagagtggactcctgttcaacttgtctcacagccagaaccttgccttgtgtgctgtcaactacacgcgtcaaataggcattgatcttgaatatctgcgtccaacatctgacttggagtctcttgcaaagaggttctttctcccaagagaatatgaactcttgaggtcactccctgatgagcagaaacagaagattttctttcgttactggacttgcaaagaggcttatctcaaagcaacgggagatggaatagccaaacttgaagagatcgagatagcactcaccccaacagaacctgccaagctccaaacagctcctgcgtggtctctgttggagcttgtgccagatgacaattgtgttgcagctgtggctgttgcgggttttggttggcagcccaagttctggcattactgagtagttagcttaatcacttaggtcacctcgagtatcaaaatctatttagaaatacacaatattttgttgcaggcttgctggagaatcgatctgctatcataaaaattacaaaaaaattttatttgcctcaattattttaggattggtattaaggacgcttaaattatttgtcgggtcactacgcatcattgtgattgagaagatcagcgatacgaaatattcgtagtactatcgataatttatttgaaaattcataagaaaagcaaacgttacatgaattgatgaaacaatacaaagacagataaagccacgcacatttaggatattggccgagattactgaatattgagtaagatcacggaatttctgacaggagcatgtcttcaattcagcccaaatggcagttgaaatactcaaaccgccccatatgcaggagcggatcattcattgtttgtttggttgcctttgccaacatgggagtccaaggttggcgcgccgaattcgcggccgcttaattaactactgtcactgaggccgtagacgagtacggactgatctaactagtgctagcctcgaggtcgacacccagctttcttgtacaaagtggttgcggccgcttaattaaatttaaattcaattaatgcaatcttgattttcaacaacgaaggtaatggcgtaaaagaaaaaatgtatgttattgtattgatctttcatgatgttgaagcgtgccataatatgatgatgtataattaaaatattaactgtcgcattttattgaaatggcactgttatttcaaccatatctttgattctgttacatgacacgactgcaagaagtaaataatagacgccgttgttaaagaattgctatcatatgtgcctaactagagggaatttgagcgtcagacctaatcaaatattacaaaatatctcactctgtcgccagcaatggtgtaatcagcgcagacaaatggcgtaaagatcgcggaaaaacctccccgagtggcatgatagctgcctctgtattgctgatttagtcagccttatttgacttaagggtgccctcgttagtgacaaattgctttcaaggagacagccatgccccacactttgttgaaaaacaaattgcctttggggagacggtaaagccagttgctcttcaataaggaatgtcgaggaggcaatgtaaccgcctctggtagtacacttctctaatccaaaaatcaatttgtattcaagataccgcaaaaaacttatggtttaaaccctgcaggactagtccagaaggtaattatccaagatgtagcatcaagaatccaatgtttacgggaaaaactatggaagtattatgtaagctcagcaagaagcagatcaatatgcggcacatatgcaacctatgttcaaaaatgaagaatgtacagatacaagatcctatactgccagaatacgaagaagaatacgtagaaattgaaaaagaagaaccaggcgaagaaaagaatcttgaagacgtaagcactgacgacaacaatgaaaagaagaagataaggtcggtgattgtgaaagagacatagaggacacatgtaaggtggaaaatgtaagggcggaaagtaaccttatcacaaaggaatcttatcccccactacttatccttttatatttttccgtgtcatttttgcccttgagttttcctatataaggaaccaagttcggcatttgtgaaaacaagaaaaaatttggtgtaagctattttctttgaagtactgaggatacaacttcagagaaatttgtaagtttgtaggtaccagatctggatcccaaaccatgtctccggagaggagaccagttgagattaggccagctacagcagctgatatggccgcggtttgtgatatcgttaaccattacattgagacgtctacagtgaactttaggacagagccacaaacaccacaagagtggattgatgatctagagaggttgcaagatagatacccttggttggttgctgaggttgagggtgttgtggctggtattgcttacgctgggccctggaaggctaggaacgcttacgattggacagttgagagtactgtttacgtgtcacataggcatcaaaggttgggcctaggatctacattgtacacacatttgcttaagtctatggaggcgcaaggttttaagtctgtggttgctgttataggccttccaaacgatccatctgttaggttgcatgaggctttgggatacacagcccggggtacattgcgcgcagctggatacaagcatggtggatggcatgatgttggtttttggcaaagggattttgagttgccagctcctccaaggccagttaggccagttacccaaatctgagtagttagcttaatcacctagagctcgatcggcggcaatagcttcttagcgccatcccgggttgatcctatctgtgttgaaatagttgcggtgggcaaggctctctttcagaaagacaggcggccaaaggaacccaaggtgaggtgggctatggctctcagttccttgtggaagcgcttggtctaaggtgcagaggtgttagcgggatgaagcaaaagtgtccgattgtaacaagatatgttgatcctacgtaaggatattaaagtatgtattcatcactaatataatcagtgtattccaatatgtactacgatttccaatgtctttattgtcgccgtatgtaatcggcgtcacaaaataatccccggtgactttcttttaatccaggatgaaataatatgttattataatttttgcgatttggtccgttataggaattgaagtgtgcttgaggtcggtcgccaccactcccatttcataattttacatgtatttgaaaaataaaaatttatggtattcaatttaaacacgtatacttgtaaagaatgatatcttgaaagaaatatagtttaaatatttattgataaaataacaagtcaggtattatagtccaagcaaaaacataaatttattgatgcaagtttaaattcagaaatatttcaataactgattatatcagctggtacattgccgtagatgaaagactgagtgcgatattatggtgtaatacataggaattcgtttaaacgatctgcgtctaattttcggtccaacttgcacaggaaagacgtcgaccgcggtagctcttgcccagcagactgggcttccagtcctttcgctcgatcgggtccaatgttgtcctcagctgtgaaccggaagcggacgaccaacagtggaagaactgaaaggaacgagccgtctataccttgatgatcggcctctggtgaagggtatcatcgcagccaagcaagctcatgaaaggctgatgggggaggtgtataattatgaggcccacggcgggcttattctttagggaggatctatctcgttgctcaagtgcatggcgcaaagcagttattggagtgcggattttcgttggcatattattcgccacgagttagcagacgaagagaccttcatgaacgtggccaaggccagagttaagcagatgttacgccctgctgcaggcctttctattatccaatagttggttgatctttggaaagagcctcggctgaggcccatactgaaagagatcgatggatatcgatatgccatgttgtttgctagccagaaccagatcacatccgatatgctattgcagcttgacgcagatatggaggataagttgattcatgggatcgctcaggagtagctcatccatgcacgccgacaagaacagaaattccgtcgagttaacgcagccgcttacgacggattcgaaggtcatccattcggaatgtattagtttgcaccagctccgcgtcacacctgtcttcatttgaataagatgttagcaattgtttttagctttgtcttgttgtggcagggcggcaagtgcttcagacatcattctgttttcaaattttatgctggagaacagcttcttaattcctttggaaataatagactgcgtcttaaaattcagatgtctggatatagatatgattgtaaaataacctatttaagtgtcatttagaacataagttttatgaatgttcttccattttcgtcatcgaacgaataagagtaaatacaccttttttaacattacaaataagttcttatacgttgtttatacaccgggaatcatttccattattttcgcgcaaaagtcacggatattcgtgaaagcgacataaactgcgaaatttgcggggagtgtcttgagtttgcctcgaggctagcgcatgcacatagacacacacatcatctcattgatgcttggtaataattgtcattagattgtttttatgcatagatgcactcgaaatcagccaattttagacaagtatcaaacggatgtgacttcagtacattaaaaacgtccgcaatgtgttattaagttgtctaagcgtcaatttgatttacaattgaatatatcctgccccagccagccaacagctcgatttacaattgaatatatcctgccggccggcccacgcgtgtcgaggaattctgatctggcccccatttggacgtgaatgtagacacgtcgaaataaagatttccgaattagaataatttgtttattgctttcgcctataaatacgacggatcgtaatttgtcgttttatcaaaatgtactttcattttataataacgctgcggacatctacatttttgaattgaaaaaaaattggtaattactctttctttttctccatattgaccatcatactcattgctgatccatgtagatttcccggacatgaagccatttacaattgaatatatcctgccgccgctgccgctttgcacccggtggagcttgcatgttggtttctacgcagaactgagccggttaggcagataatttccattgagaactgagccatgtgcaccttccccccaacacggtgagcgacggggcaacggagtgatccacatgggacttttaaacatcatccgtcggatggcgttgcgagagaagcagtcgatccgtgagatcagccgacgcaccgggcaggcgcgcaacacgatcgcaaagtatttgaacgcaggtacaatcgagccgacgttcacgcggaacgaccaagcaagcttggctgccatttttggggtgaggccgttcgcggccgaggggcgcagcccctggggggatgggaggcccgcgttagcgggccgggagggttcgagaagggggggcaccccccttcggcgtgcgcggtcacgcgcacagggcgcagccctggttaaaaacaaggtttataaatattggtttaaaagcaggttaaaagacaggttagcggtggccgaaaaacgggcggaaacccttgcaaatgctggattttctgcctgtggacagcccctcaaatgtcaataggtgcgcccctcatctgtcagcactctgcccctcaagtgtcaaggatcgcgcccctcatctgtcagtagtcgcgcccctcaagtgtcaataccgcagggcacttatccccaggcttgtccacatcatctgtgggaaactcgcgtaaaatcaggcgttttcgccgatttgcgaggctggccagctccacgtcgccggccgaaatcgagcctgcccctcatctgtcaacgccgcgccgggtgagtcggcccctcaagtgtcaacgtccgcccctcatctgtcagtgagggccaagttttccgcgaggtatccacaacgccggcggccgcggtgtctcgcacacggcttcgacggcgtttctggcgcgtttgcagggccatagacggccgccagcccagcggcgagggcaaccagcccggtgagcgtcggaaagggtcgacggatcttttccgctgcataaccctgcttcggggtcattatagcgattttttcggtatatccatcctttttcgcacgatatacaggattttgccaaagggttcgtgtagactttccttggtgtatccaacggcgtcagccgggcaggataggtgaagtaggcccacccgcgagcgggtgttccttcttcactgtcccttattcgcacctggcggtgctcaacgggaatcctgctctgcgaggctggccggctaccgccggcgtaacagatgagggcaagcggatggctgatgaaaccaagccaaccaggaagggcagcccacctatcaaggtgtactgccttccagacgaacgaagagcgattgaggaaaaggcggcggcggccggcatgagcctgtcggcctacctgctggccgtcggccagggctacaaaatcacgggcgtcgtggactatgagcacgtccgcgagctggcccgcatcaatggcgacctgggccgcctgggcggcctgctgaaactctggctcaccgacgacccgcgcacggcgcggttcggtgatgccacgatcctcgccctgctggcgaagatcgaagagaagcaggacgagcttggcaaggtcatgatgggcgtggtccgcccgagggcagagccatgacttttttagccgctaaaacggccggggggtgcgcgtgattgccaagcacgtccccatgcgctccatcaagaagagcgacttcgcggagctggtattcgtgcagggcaagattcggaataccaagtacgagaaggacggccagacggtctacgggaccgacttcattgccgataaggtggattatctggacaccaaggcaccaggcgggtcaaatcaggaataagggcacattgccccggcgtgagtcggggcaatcccgcaaggagggtgaatgaatcggacgtttgaccggaaggcatacaggcaagaactgatcgacgcggggttttccgccgaggatgccgaaaccatcgcaagccgcaccgtcatgcgtgcgccccgcgaaaccttccagtccgtcggctcgatggtccagcaagctacggccaagatcgagcgcgacagcgtgcaactggctccccctgccctgcccgcgccatcggccgccgtggagcgttcgcgtcgtctcgaacaggaggcggcaggtttggcgaagtcgatgaccatcgacacgcgaggaactatgacgaccaagaagcgaaaaaccgccggcgaggacctggcaaaacaggtcagcgaggccaagcaggccgcgttgctgaaacacacgaagcagcagatcaaggaaatgcagctttccttgttcgatattgcgccgtggccggacacgatgcgagcgatgccaaacgacacggcccgctctgccctgttcaccacgcgcaacaagaaaatcccgcgcgaggcgctgcaaaacaaggtcattttccacgtcaacaaggacgtgaagatcacctacaccggcgtcgagctgcgggccgacgatgacgaactggtgtggcagcaggtgttggagtacgcgaagcgcacccctatcggcgagccgatcaccttcacgttctacgagctttgccaggacctgggctggtcgatcaatggccggtattacacgaaggccgaggaatgcctgtcgcgcctacaggcgacggcgatgggcttcacgtccgaccgcgttgggcacctggaatcggtgtcgctgctgcaccgcttccgcgtcctggaccgtggcaagaaaacgtcccgttgccaggtcctgatcgacgaggaaatcgtcgtgctgtttgctggcgaccactacacgaaattcatatgggagaagtaccgcaagctgtcgccgacggcccgacggatgttcgactatttcagctcgcaccgggagccgtacccgctcaagctggaaaccttccgcctcatgtgcggatcggattccacccgcgtgaagaagtggcgcgagcaggtcggcgaagcctgcgaagagttgcgaggcagcggcctggtggaacacgcctgggtcaatgatgacctggtgcattgcaaacgctagggccttgtggggtcagttccggctgggggttcagcagccagcgctttactggcatttcaggaacaagcgggcactgctcgacgcacttgcttcgctcagtatcgctcgggacgcacggcgcgctctacgaactgccgataaacagaggattaaaattgacaattgtgattaaggctcagattcgacggcttggagcggccgacgtgcaggatttccgcgagatccgattgtcggccctgaagaaagctccagagatgttcgggtccgtttacgagcacgaggagaaaaagcccatggaggcgttcgctgaacggttgcgagatgccgtggcattcggcgcctacatcgacggcgagatcattgggctgtcggtcttcaaacaggaggacggccccaaggacgctcacaaggcgcatctgtccggcgttttcgtggagcccgaacagcgaggccgaggggtcgccggtatgctgctgcgggcgttgccggcgggtttattgctcgtgatgatcgtccgacagattccaacgggaatctggtggatgcgcatcttcatcctcggcgcacttaatatttcgctattctggagcttgttgtttatttcggtctaccgcctgccgggcggggtcgcggcgacggtaggcgctgtgcagccgctgatggtcgtgttcatctctgccgctctgctaggtagcccgatacgattgatggcggtcctgggggctatttgcggaactgcgggcgtggcgctgttggtgttgacaccaaacgcagcgctagatcctgtcggcgtcgcagcgggcctggcgggggcggtttccatggcgttcggaaccgtgctgacccgcaagtggcaacctcccgtgcctctgctcacctttaccgcctggcaactggcggccggaggacttctgctcgttccagtagctttagtgtttgatccgccaatcccgatgcctacaggaaccaatgttctcggcctggcgtggctcggcctgatcggagcgggtttaacctacttcctttggttccgggggatctcgcgactcgaacctacagttgtttccttactgggctttctcagcccccgagcgcttagtgggaatttgtaccccttatcgaaccgggagcacaggatgacgcctaacaattcattcaagccgacaccgcttcgcggcgcggcttaattcaggagttaaacatcatgagggaagcggtgatcgccgaagtatcgactcaactatcagaggtagttggcgtcatcgagcgccatctcgaaccgacgttgctggccgtacatttgtacggctccgcagtggatggcggcctgaagccacacagtgatattgatttgctggttacggtgaccgtaaggcttgatgaaacaacgcggcgagctttgatcaacgaccttttggaaacttcggcttcccctggagagagcgagattctccgcgctgtagaagtcaccattgttgtgcacgacgacatcattccgtggcgttatccagctaagcgcgaactgcaatttggagaatggcagcgcaatgacattcttgcaggtatcttcgagccagccacgatcgacattgatctggctatcttgctgacaaaagcaagagaacatagcgttgccttggtaggtccagcggcggaggaactctttgatccggttcctgaacaggatctatttgaggcgctaaatgaaaccttaacgctatggaactcgccgcccgactgggctggcgatgagcgaaatgtagtgcttacgttgtcccgcatttggtacagcgcagtaaccggcaaaatcgcgccgaaggatgtcgctgccgactgggcaatggagcgcctgccggcccagtatcagcccgtcatacttgaagctaggcaggcttatcttggacaagaagatcgcttggcctcgcgcgcagatcagttggaagaatttgttcactacgtgaaaggcgagatcaccaaggtagtcggcaaataatgtctaacaattcgttcaagccgacgccgcttcgcggcgcggcttaactcaagcgttagagagctggggaagactatgcgcgatctgttgaaggtggttctaagcctcgtcttgcgatggcatttcgatccattcccattccgcgctcaagatggcttcccctcggcagttcatcagggctaaatcaatctagccgacttgtccggtgaaatgggctgcactccaacagaaacaatcaaacaaacatacacagcgacttattcacacgagctcaaattacaacggtatatatcctgccagtcagcatcatcacaccaaaagttaggcccgaatagtttgaaattagaaagctcgcaattgaggtctacaggccaaattcgctcttagccgtacaatattactcaccggatcctaaccggtttaattaaggcgcgccatgcccgggcaagcggccgcacaagtttgtacaaaaaagcaggcttctag

SEQ ID NO: 58 - DNA, 36767 bp, Artificial sequence
  plasmid pDAB7734
gatccacaaccaaaaatggcagcgaggctgcaagagcagaaaggaggtgagatggacacgaggattgcgatcataggcatgagcgccatacttccttgtggaaccacggtgagagagtcatgggagaccataagggctggcattgattgcctgtctgatcttcctgaggatcgtgttgatgtgactgcgtactttgacccagtcaagaccacaaaggacaaaatctactgcaagagaggaggtttcattcctgagtatgactttgatgcgcgtgagtttggtctcaacatgttccagatggaagattctgatgcgaatcagaccatctcacttctcaaggtcaaagaagcacttcaagatgctgggattgatgcacttggaaaggagaagaaaaacataggatgcgtgcttggcattggaggtggacagaagagttcacatgagttctacagcagactcaactatgtggttgtggagaaagtcttgagaaagatggggatgccagaggaagatgtcaaagtggctgtggagaagtacaaagcgaacttcccagaatggagacttgactctttccctggattccttgggaatgtcactgctggcagatgcaccaacacattcaacttggatggcatgaactgcgttgtggatgctgcatgtgcaagctccttgatagcagtcaaggttgcgattgatgaactgctctatggtgactgcgacatgatggtcactggtgcaacctgcacagacaactccattgggatgtacatggctttctcaaagacacctgtgttcagcacggacccaagtgtgagagcgtatgatgagaaaacgaaagggatgctcattggtgagggatcagccatgttggtgctcaaacgttatgcagatgcagtgagggatggtgatgagattcatgctgtgattcgtggttgtgcaagctcaagtgatggcaaagcagctggcatctacactcccacaatcagtggtcaagaggaagccttgagacgtgcatacaatcgtgcctgcgttgaccctgccactgtcactttggttgagggtcatgggactggcactccagttggagataggattgagttgactgcgttgaggaacttgtttgacaaagcgtatggtgaagggaacacagagaaagttgcagttggaagtatcaagtccagtattggtcatttgaaggctgttgctggtcttgctggaatgatcaaggtcatcatggctctcaaacacaagactttgcctggaacgatcaatgtggacaatccacccaatctctatgacaacactcccatcaatgagtcatccctctacatcaacacgatgaacagaccctggttccctccacctggtgttccgagacgtgctggaatatccagctttggctttggaggtgccaactaccatgcagtgttggaagaggctgaaccagagcacacgacagcgtacagactcaacaaacgtccacaaccggtgttgatgatggctgcaactcctgctgcgttgcagagcctttgtgaagctcagctgaaagagtttgaagctgcgatcaaggagaatgagacagtcaagaatactgcctacatcaagtgtgtcaagtttggagaacagttcaagttccctgggagcatacctgcgaccaatgcgagactgggattcttggtcaaagatgcggaggatgcgtgctccacgcttcgtgctatatgtgctcagtttgccaaagatgtgaccaaagaagcgtggaggcttccgagagaaggagtttctttccgtgccaaaggcattgccaccaatggtgctgttgctgcactcttctctggacaaggtgctcagtacacacacatgttcagtgaagttgcgatgaactggcctcagttcagacagtccattgctgcaatggacgctgcacagtccaaggttgctggaagtgacaaagactttgaaagagtctctcaagtcctgtacccaaggaaaccgtacgaacgtgagccagaacaagatcacaagaaaatctcactcacagcatacagccagccgtcaaccctggcatgtgctcttggtgcctttgagattttcaaggaagctggattcactccagactttgcagctggacacagcttgggtgagtttgctgcgctctatgcagctggttgtgttgacagagatgagttgtttgaacttgtttgcagaagggcaaggatcatgggaggcaaagatgcacctgccacacccaaaggttgcatggcagctgtcataggacccaacgcagagaacatcaaggttcaagctgccaacgtctggcttggaaactcaaactctccgtctcagactgtcattactgggtctgttgaagggattcaagctgaaagtgccagattgcagaaggaagggttcagagttgtgcctcttgcttgtgagtctgccttccattctccacagatggaaaatgccagctcagctttcaaagatgtcatatccaaggtttccttccgtacacccaaagcagaaacaaagctcttcagcaatgtttctggagagacctatccgacggatgccagagagatgctcactcaacacatgacctcatctgtgaagttcctgacccaagtgaggaacatgcaccaagctggtgcgagaatctttgttgagtttggaccgaaacaagttctcagcaaacttgtttctgaaaccctcaaagatgacccgtctgttgtcacagtgtctgtgaacccagcttctggcacggactctgacatacagttgagggatgctgcagttcagctggttgtggctggtgtcaatcttcaagggtttgacaagtgggatgctcctgatgccacgaggatgcaagccatcaagaaaaagagaaccacactcagactttcagctgccacctatgtcagtgacaagaccaagaaagtgagggatgctgccatgaacgacggaagatgtgtcacatacctcaagggtgctgcaccactcatcaaggctcctgaacctgtggttgacgaagctgccaagagggaggctgaaaggcttcagaaggagcttcaagacgctcagaggcagcttgacgacgccaaacgtgcagctgcagaagccaactccaaacttgctgctgccaaggaggaagccaagactgctgcagcttcagccaagcctgcagttgacactgctgttgtggagaaacatcgtgccatcctcaagtccatgctggctgagctggatggttatggaagtgttgatgcttcttcccttcagcaacagcaacagcaacagactgctccggcgcctgttaaagccgctgcccctgccgctcccgttgcaagtgctcctgctcccgccgtgtccaacgagttgcttgagaaagctgagacagttgtgatggaggttctcgctgccaagactggatacgaaacagacatgattgaggcggacatggagcttgagactgagttgggaattgacagcatcaagagggttgaaattctttctgaagtccaagctatgcttaacgttgaggcgaaagatgttgatgctctctctaggacgagaacagtgggtgaagttgtcaacgctatgaaggcagaaatcgctggttcttccgctccggcgccggcagctgccgcacctgcaccggctaaagcggctccagctgcagctgcaccagctgtttctaatgagctgctcgaaaaggcagaaactgttgtgatggaagtccttgctgccaaaactggctacgaaactgacatgatagaatcagacatggagcttgagacggagcttggaattgattccatcaagcgtgtggaaatcctcagtgaagtccaagccatgctcaatgtggaagctaaggatgtggatgctctctcaaggaccagaactgtcggtgaggttgtcaatgccatgaaggctgagatagctggaggctccgctcctgcgccggccgctgccgctcctggtcccgctgccgcggctccagctccagctgcagccgctccggccgtctcaaacgaactccttgaaaaagctgagaccgtcgtgatggaggtcttggcagctaaaaccggctatgagactgacatgattgagtctgacatggaattggagacagaacttgggatagacagcatcaaacgtgttgaaatcctcagtgaggtccaagctatgctgaacgtggaagcgaaggatgttgatgctctgtccagaacgaggaccgttggtgaggttgtggatgccatgaaggctgaaattgctggagggtctgcgcccgcgccagctgcagccgctcctgcacccgcagccgcggcacctgctccagctgcacctgcacctgccgtttcttcagaactcttggagaaggctgagacggttgtgatggaggttttggctgcaaagactggctatgagaccgacatgattgaatctgatatggaattggagacagagcttgggatcgattccatcaaaagagtggagatcctgagtgaagtccaagccatgctcaatgttgaagctaaggatgttgatgcactttcaagaacaaggacagtgggtgaggttgtggatgccatgaaggcggagattgctggagggagcgcgcctgcgccagctgccgcggcacctgcaccggcagccgcagctccagctccagctgcaccagcaccggccgcgcccgcgccagctgtttcatccgaactcctggaaaaggccgagacggttgtgatggaggtgctcgcagctaagactggttacgagaccgacatgattgaaagtgacatggagcttgaaaccgagttgggaatagatagcatcaaacgtgttgaaatcttgtctgaggtccaagctatgttgaacgtggaggcaaaagatgtcgatgcgctttcaagaaccagaacagtcggtgaggtcgtggacgccatgaaggctgaaattgccggaagctctgctagtgcgccagctgcagccgcacctgcacctgctgccgcggcacctgctccagctgcagccgctcctgccgtcagcaatgagttgctggagaaagccgaaacagttgtgatggaagtccttgctgcaaaaactggttacgaaacggacatgattgagtcagacatggaattggagaccgaacttggaatagattccatcaagagagtggagatcctctctgaggtgcaagccatgctcaacgttgaggctaaagatgttgatgcactcagtaggacaagaactgtgggggaagttgtcgatgcgatgaaggctgagattgctggaggctctgctcctgcgccggcagctgccgcacctgcacccgcagccgcggcaccagctgtcagcaacgaattgcttgagaaggctgaaacagttgtcatggaagtgctggctgcaaaaaccggctatgagactgacatgattgagtctgacatggaacttgagacggaattgggcattgacagcatcaagcgtgttgagatcctcagtgaagtccaagcaatgctcaatgtggaggctaaggatgtggatgccctctcaaggaccagaacagttggtgaggtcgttgatgcgatgaaggcggagatcgctggaagttccgcgcctgcgccagctgcagccgctcctgcacccgcagccgcggcaccggctccagctgcagccgcaccggccgtctcctcagaactcctggaaaaggctgagacagttgtgatggaagtccttgctgcgaaaactggctatgagaccgacatgattgaatctgacatggaactggagaccgagcttggaattgactccatcaaacgtgttgaaatcctctctgaggttcaagcgatgttgaatgtggaggccaaagatgttgatgctctttccagaacaaggacggtgggagaggtggttgatgccatgaaggctgagatagctgggggttctgctcctgcgccagctgcagccgctcctgctcccgctgccgcggcaccagctgtcagcaacgaactccttgaaaaagctgaaactgttgtgatggaggttttggctgcaaagactggatacgagactgacatgatagagtcagacatggagttggaaacagagcttgggattgatagcatcaagcgtgtggaaatcctttctgaggttcaagccatgctgaacgttgaggccaaagatgtcgatgctttgtcaaggaccagaacggttggagaagtggtcgatgccatgaaggctgagatagctggtggatcagcccctgctccggctgcagccgctcctgcaagtgccggtgctgcaccagctgtgaagattgattcagttcatggtgctgactgtgacgatttgtcactgatgcacgcaaaggtggttgacatcagaaggccagatgaactgattctggaaagaccggagaaccgtccagttcttgtcgttgacgatggctcagagttgacacttgctcttgtgagggtgttgggagcctgtgcagttgtcttgacctttgagggattgcagttggctcagagagctggtgcagctgccattcgtcatgttctggctaaggacctttcagcagaatcagctgagaaggccatcaaagaggctgagcaaagatttggagcgttgggaggcttcataagccagcaagcagaaaggtttgaaccagctgagatactgggtttcacactcatgtgtgcgaagtttgccaaagcctctctctgcactgctgtggctggaggtcgtcctgccttcatcggtgtggctaggcttgacggcagacttggattcacctctcaaggcacttctgacgcactcaagagagcacagcgtggagcgatctttggactctgcaagacaatagggttggagtggtcagaatctgatgtgttcagccgtggtgtggacattgctcaagggatgcacccagaagatgctgcagttgccatagttagggagatggcgtgtgctgacatcagaatcagagaggttgggattggagcaaaccagcaaagatgcacaatcagagctgccaagttggagactgggaaccctcagagacagatagcgaaagacgatgtgcttctggtttctggaggtgctcgtgggatcacacctctttgcatccgtgagatcacgcgtcagattgctggaggcaagtacattctgttgggtcgtagcaaagtttctgcgtctgaaccagcatggtgtgctggcatcactgatgagaaggctgtgcagaaagctgccacccaagagttgaagagggccttcagtgctggtgaaggacccaaacccactccaagggctgtcacgaaacttgtgggatctgttcttggtgctcgtgaagtgagaagctccattgctgccattgaagctctgggtggcaaagcgatctacagctcttgtgatgtgaactctgctgcagatgttgccaaagcagttagggatgcagagtcccagcttggtgccagagttagtggaatcgttcacgcttctggtgtgctccgtgatcgtctcatagagaagaaactccctgacgagtttgatgctgtctttgggaccaaagtcactgggttggagaatcttctggctgcagttgatcgtgccaacctcaaacacatggttctcttcagctcccttgctggtttccacggcaatgttggtcagtctgactatgcgatggcaaacgaagctctcaacaagatgggtttggaacttgcgaaggatgtcagtgtcaagtccatctgctttggtccctgggatggtgggatggtgacacctcaactcaagaaacagtttcaagaaatgggagttcagatcattcctcgtgaaggaggtgctgatacagttgcgaggattgtgttgggatcaagtcctgctgagatccttgttggaaactggaggacaccatccaagaaagttggaagtgacacgatcaccctgcatagaaagatcagtgccaagtccaatcccttcttggaggatcatgtcatacaaggcagaagggtgttgccaatgacccttgctattgggagccttgctgagacctgccttggactcttccctggctactctctctgggccatagatgacgcacagctcttcaaaggtgtcactgttgatggagacgtcaactgtgaagtgaccctcacaccgtccactgctccgagtgggagggtgaatgtccaagcgacgctcaagacgttctcaagtggaaaacttgttccagcctacagagctgtcatagtgttgtccaaccaaggtgctccacctgccaatgcaaccatgcagcctccgagccttgatgcagatcctgctttgcaagggtcagtctatgatggcaagactctctttcatggtcctgcgttcagaggcattgatgacgttctcagctgcaccaagagccagcttgttgccaagtgttctgctgttcctggatcagatgcagccagaggagagtttgcaactgacactgatgcacatgatccctttgtcaatgatcttgcctttcaagcaatgttggtctgggtgaggagaacgctgggacaagctgcactcccgaactccattcagaggatagtccaacacagaccggtcccacaagacaaacccttctacatcaccctcagatccaatcagagtggtggacatagccagcacaaacatgcacttcagttccacaacgaacaaggtgatctcttcattgatgttcaagcctctgtcattgcgacagactcacttgcgttctgagtagttagcttaatcacttaggtcacccagtccaagcccggcctagcacgatgatcatgagtgttgctattgatgtatgttaatactatacacagtcatcgtgtgtgttttataaaactgtaagcttaggatgtttgaggctaatgtaattagcactacaccgtaataaatgagaggtttactttatgttttaataatgttcttacccttgctgctctctaaactgtaatggcgtacggttagctaaactaaagtaaaaatcgattcgcttgagtaaaattagtgaccgggaaagatcatcgactactactgctcagagatgtaatcggtaattaagacttcaagctcaataattaattaggagtaaatctggcttcgaatttttaaattgtcaacttccaaagaaggattggcaagactcaatctcaattgcccaacaaacatatggctctttacaaatttggaatctctttttgatggcaagaacgtcgtaattcctctgtcgatctcatgtaattaccaaactcatctacttattactttctttatatgcacttactgatgcggccgcttaattaagatgagtgatactcaggactcaggactcactctgctgatcactagtgctagcctcgaggtcgacacaactttgtatacaaaagttgtctaggatctgcttttacatgcgagacacatcttctaaagtaattttaataatagttactatattcaagatttcatatatcaaatactcaatattacttctaaaaaattaattagatataattaaaatattacttttttaattttaagtttaattgttgaatttgtgactattgatttattattctactatgtttaaattgttttatagatagtttaaagtaaatataagtaatgtagtagagtgttagagtgttaccctaaaccataaactataagatttatggtggactaattttcatatatttcttattgcttttaccttttcttggtatgtaagtccgtaactggaattactgtgggttgccatgacactctgtggtcttttggttcatgcatggatcttgcgcaagaaaaagacaaagaacaaagaaaaaagacaaaacagagagacaaaacgcaatcacacaaccaactcaaattagtcactggctgatcaagatcgccgcgtccatgtatgtctaaatgccatgcaaagcaacacgtgcttaacatgcactttaaatggctcacccatctcaacccacacacaaacacattgcctttttcttcatcatcaccacaaccacctgtatatattcattctcttccgccacctcaatttcttcacttcaacacacgtcaacctgcatatgcgtgtcatcccatgcccaaatctccatgcatgttccaaccaccttctctcttatataatacctataaatacctctaatatcactcacttctttcatcatccatccatccagagtactactactctactactataataccccaacccaactcatattcaatactactctaggatccacaaccaaaaatggctgcaaggaacgtgagtgcggctcatgagatgcatgacgagaagaggatagctgttgtgggcatggctgttcagtatgctggatgcaaaacgaaagacgagttctgggaagttctcatgaatggaaaagttgagagcaaagtgatcagcgacaaacgtcttggttcaaattaccgtgctgaacactacaaagctgaaaggagcaagtatgctgacaccttctgcaatgagacatatggaactcttgatgagaacgaaatagacaatgagcatgaactccttttgaaccttgccaaacaagccttggctgaaacatctgtcaaagattcaacaagatgtggcatagtttctggatgcctcagcttcccgatggacaacctccaaggtgaactcttgaatgtgtaccagaaccatgttgagaagaaacttggtgccagagttttcaaagatgcctctcactggtcagaaagagaacagtccaacaaaccagaggctggtgacagaagaatcttcatggaccctgcttcctttgttgctgaggaactcaatcttggcgctctccactactctgttgatgctgcctgtgccactgcgctctatgtgctcagactggcgcaagatcacttggtctctggtgcagctgatgtgatgctttgtggtgcaacatgcctgccggagccgtttttcatactctctgggttctcaaccttccaagccatgcctgttggaacgggtcagaatgtgtccatgccgctgcacaaagattctcaaggattgacccctggtgaaggaggttccatcatggtcctcaaacgtttggatgacgcaatcagagatggagatcacatctatggaacacttttgggagccaatgtcagcaacagtggcactggtctgccacttaaaccccttttgccgtcagagaaaaagtgcctcatggacacctacacacgtatcaatgtgcatccccacaagattcagtatgttgaatgccatgcaactgggactccacaaggtgatcgtgtggaaattgatgctgtgaaggcttgctttgaaggcaaagtcccacgttttggaaccacaaaagggaactttggacacacattggtggcagctgggtttgctggcatgtgcaaagtgcttctctccatgaagcacgggatcattccacccactccgggaatagatgacgaaacgaagatggaccctctggttgtctctggtgaggccattccctggccagaaacgaatggagaaccgaagcgtgctggtctctcagcgtttggatttggtgggaccaatgctcatgctgtctttgaggaacatgacccaagcaatgctgcatgcactggccatgactccatttctgctctctctgcacgttgtggtggtgagtcaaacatgagaatagcaatcactgggatggatgccacttttggtgctttgaaaggattggatgcttttgaaagggccatctacactggtgctcatggtgctataccactcccagaaaagagatggagattcctggggaaagacaaggacttccttgatctttgtggagtcaaagcaacaccgcatggctgttacattgaagatgttgaagttgatttccagaggctgaggactccaatgactcctgaagatatgctcttgcctcaacagcttctggctgtcaccacaattgatagggccatattggactctggcatgaagaaaggtggaaatgtggctgtctttgtggggttggggaccgatcttgaactctaccgtcaccgtgcaagggttgctctcaaggagagagtgaggcctgaagccagcaagaaactcaatgacatgatgcagtacatcaatgattgtgggacaagcacttcttacaccagctacataggcaacttggttgcaacaagggtcagttcacaatggggcttcacgggaccttccttcacaatcacagaaggcaacaattctgtgtacagatgtgctgaacttggcaaatacctcttggaaacgggagaggttgatggggttgtggttgcgggtgttgatctctgtgggagtgctgagaacctttacgtcaagtcaaggcgtttcaaggtgtctacatctgacaccccgagagccagctttgatgcagctgctgatggttactttgttggagagggctgtggtgcatttgtgctcaagcgtgagacaagctgcaccaaggatgacagaatctatgcttgcatggatgccatagttcctggaaatgttccatctgcatgtttgagagaggcattggatcaagccagagtcaagcctggagacatcgagatgttggagctttctgctgattcagcgaggcatttgaaggacccgtctgttctcccaaaggaactcactgctgaggaagagattggcggacttcagacgattcttcgtgacgatgacaagctcccaaggaatgttgcaactggaagtgtcaaggccactgttggtgacactggttatgcttctggtgctgccagtttgattaaggctgcgctttgcatctacaaccgttacctgcccagcaatggagatgactgggatgaacctgcacctgaagcaccctgggacagcacactctttgcgtgccagacctcaagagcttggttgaagaaccctggtgagagacgttatgcggctgtttccggagtcagtgaaaccagaagttgctacagtgtgctgctttctgaagcagagggacactacgagagagagaacagaatcagtttggatgaggaagcacccaagctcattgtgttgagagcagactcccatgaagagattcttggaagattggacaagataagggaaaggttcttgcagcccacgggtgctgcacccagagagtctgaattgaaggcgcaagcccgtaggatctttcttgaactccttggtgagacccttgcccaagatgcagcttcatctggaagtcagaagccccttgctctcagcttggtctccactccatccaagctccagagagaggtggaacttgcggcaaaaggcattccgagatgtctcaagatgagacgtgattggagttcccctgctggaagcagatatgcgcctgagcctttggccagtgacagagttgccttcatgtatggagaaggaaggagcccttactatggcatcacacaagacattcataggatttggcctgaacttcatgaggtcatcaatgagaaaacaaaccgtctctgggctgaaggtgacagatgggtcatgccaagggccagcttcaagagtgagcttgagtcacaacagcaagagtttgacagaaacatgattgaaatgttccgtcttggaatcctcacctcaattgccttcacaaacctggcgagagatgttctcaacatcacgcccaaagcagcctttggactcagtttgggagagatttccatgatctttgctttctccaagaaaaacggtttgataagcgatcagttgacaaaggatttgagagagtcagatgtctggaacaaagctctggctgttgagttcaatgcgctcagagaagcctggggcattccacagtctgtcccaaaagatgagttctggcaaggttacatagtgaggggaacgaaacaagacatagaagcagccatagcaccagactcaaagtatgtgaggttgaccatcatcaatgatgccaacactgctctcatcagtggaaagcctgatgcatgcaaagctgcgattgctcgtcttggtggcaacatccctgcgcttccagtcactcaaggcatgtgtgggcattgcccagaggtgggaccttacaccaaggacatcgcaaagatccacgccaaccttgagttccctgtggttgatggtcttgatctctggactaccataaaccagaagaggcttgtgccaagagccacgggtgccaaagatgaatgggctccttcatcctttggggagtatgctggacagctctatgagaaacaagccaacttccctcagatagttgaaaccatctacaagcagaactatgatgtgtttgttgaagttgggccaaacaatcacagaagcacagcagtgagaaccacgcttggaccacagagaaaccaccttgctggtgccatagacaagcagaacgaggatgcttggacgacaatagtcaagctcgtggcttcattgaaggctcaccttgttcctggagtgaccatcagtccgctctaccactccaagctcgttgcagaggctgaggcttgttatgctgcgctctgtaaaggtgagaaacccaagaaaaacaagtttgtgagaaagattcagttgaatggcagattcaacagcaaggcagaccccatctcctcagcagaccttgcatccttcccacctgcggaccctgcgattgaagctgccatctcttcaaggatcatgaagcctgtggctccgaaattctatgcgcgtctcaacattgatgagcaagatgagaccagagatccgatcttgaacaaggacaatgcgccttccagctccagctcttccagcagttcctcttccagcagttcatctccgtctcctgctccttcagctccagttcagaagaaagctgccccagctgcggagacaaaagctgttgccagtgctgatgcacttcgtagtgccctgcttgatcttgactccatgcttgcgctcagctctgcaagtgcttctggcaaccttgttgagactgcgccatctgatgccagtgtcattgtccctccgtgcaacattgctgatcttggcagcagagctttcatgaaaacttatggtgtttctgcgcctctgtacaccggtgcaatggccaagggaattgcctctgcggacttggtgatcgcagctggaaggcaaggaatccttgcgtcatttggtgctggaggccttccaatgcaagttgtgcgtgagtccattgaaaagattcaagctgccctgcccaatggaccatatgctgtcaacctcatccattctccttttgacagcaaccttgagaagggaaatgttgatctcttcttggaaaagggtgtcacttttgttgaggcttcagccttcatgacgttgacaccgcaagttgtcagatacagagcggctgggttgacgaggaatgcagatgggtcagtcaacataaggaacagaatcattgggaaagtctccagaactgagctggctgaaatgttcatgcgtcctgcacctgagcatcttttgcagaagctcattgcttctggggagatcaatcaagaacaagctgagttggccagacgtgttcctgtggctgatgacattgcggttgaagctgattctggtggacacactgacaaccgtccaatccatgtcattctgcctctgattatcaacctgagggataggcttcacagagagtgtggatacccagcaaacctgagggttcgtgttggtgctgggggtggcattgggtgtccccaagctgcgctggcaactttcaacatgggtgcctctttcattgtcactggaacagtgaaccaagttgccaaacaatctgggacgtgtgacaatgtgaggaaacagcttgcgaaagcaacttactcagatgtttgcatggcaccggcagctgacatgtttgaggaaggtgtgaaacttcaagttttgaagaaaggaacaatgttcccttcaagagccaacaaactctatgagttgttctgcaagtatgattcttttgagtccatgcctccagcagagcttgcgagggttgagaaaagaatcttcagtcgtgcattggaagaggtctgggatgagaccaagaacttctacatcaaccgtctccacaacccagagaagatacagagggctgagagggaccccaaactgaagatgtcactgtgtttcagatggtatctgtccctggcttcaaggtgggccaacactggagcttctgacagagtcatggactaccaagtttggtgtggtcctgccattggttcattcaatgatttcatcaaaggaacttaccttgatccggcagtggcaaatgagtacccgtgtgttgtgcagatcaacaaacagattcttagaggagcgtgcttcttgaggcgtcttgaaatactgagaaatgcaaggctttcagatggtgcagctgcacttgtggcgagcattgatgacacatatgtccctgctgagaagctgtgagtagttagcttaatcacttaggtcacctcgagtatcaaaatctatttagaaatacacaatattttgttgcaggcttgctggagaatcgatctgctatcataaaaattacaaaaaaattttatttgcctcaattattttaggattggtattaaggacgcttaaattatttgtcgggtcactacgcatcattgtgattgagaagatcagcgatacgaaatattcgtagtactatcgataatttatttgaaaattcataagaaaagcaaacgttacatgaattgatgaaacaatacaaagacagataaagccacgcacatttaggatattggccgagattactgaatattgagtaagatcacggaatttctgacaggagcatgtcttcaattcagcccaaatggcagttgaaatactcaaaccgccccatatgcaggagcggatcattcattgtttgtttggttgcctttgccaacatgggagtccaaggttggcgcgccgaattcgcggccgcttaattaatctgacctgaccactagacctgagtgagtacagatgtgctactagtgctagcctcgaggtcgaccaacttttctatacaaagttgtctagacctaggttaattaagcggccgcagcttatttctcttttcgatactctaattgagccgtgcgctctatctagaccaattagaattgatggagctctaaaggttgctggctgttttcttgttcatatgattaacttctaaacttgtgtataaatattctctgaaagtgcttcttttggcatatgtaggttgggcaaaaacgaggaagattgcttctcaatttggaagatgatgaacagccgaagaagaaaataagaataggcagtcctgctactcaatggatctcagtctataacggtcgtcgtcccatgaaacagaggtaacacattttttgcatatacactttgatagttcctcactaactgtgtaatcttttggtagatatcactacaatgttggagagacaaggctgcgccagcatatacagaagggaaatgaagatggccttttgattagctgtgtagcatcagcagctaatctctgggctctcatcatggatgctggaactggattcacttctcaagtttatgagttgtcaccggtcttcctacacaaggtaataatcagttgaagcaattaagaatcaatctgatttgtagtaaactaagaagaacttaccttatgatttccccgcaggactggattatggaacaatgggaaaagaactactatataagctccatagcgggttcagataacgggagctctttagttgttatgtcaaaaggttagtgtttagtgaataataaacttattatcaaaaagtcttcattgacttatttatatacttgttgtgaattggtaggaactacttattctcagcagtcatacaaagtgagtgactcatttccattcaagtggataaataagaaatggaaagaagattttcatgtaacctccatgacaactgctggtaatcgttggggtgtggtaatgtcgaggaactctggcttctctgatcaggtaggtttttgtctcttattgtctggtgtttttattttcccctgatagtctaatatgataaactctgcgttgtgaaaggtggtggagcttgactttttgtacccaagcgatgggatacataggaggtgggagaatgggtatagaataacatcaatggcagcaactgcggatcaagcagctttcatattaagcataccaaagcgtaagatggtggatgaaactcaagagactctccgcaccaccgcctttccaagtactcatgtcaaggttggtttctttagctttgaacacagatttggatctttttgttttgtttccatatacataggacctgagagcttttggttgaattttttttttttcaggacaaatgggcgaagaatctgtacattgcatcaatatgctatggcaggacagtgtgctgatgatacacacttaagcatcatgtgttgtgttagaaagccgaagacaattggagcgagcctcagggtcgtcataataccaatcaaagacgtaaaaccagacgcagtctctttggttgaatgtgatgaaagggatgtgtcttggtatgtatgtacgagtaacaaaagagaagatgcaattgagtagtagaaagatttgagagctttttaaagcccttcaagtgtgtgcttttatcttattgatatcatccatttgcgttgtttaatgcgtctttagatatgtttctgtttctttctcagtgtctgaatatctgataagtgcaatgtgagaaagccacaccaaaccaaaatattcaaatcttatatttttaataatgtcgaatcactcggagttgccaccttctgtgccaattgtgctgaatctatcacactaaaaaaaacatttcttcaaggtaatgacttgtggactatgttctgaattctcattaagtttttattttttgaagtttaagtttttaccttcttttttgaaaaatatcgttcataagatgtcacgccaggacatgagctacacatcacatattagcatgcagatgcggacgatttgtcactcacttcaaacacctaaaagagcttctctctcacagcacacacacatatgcatgcaatatttacacgtgatcgccatgcaaatctccattctcacctataaattagaggctcggcttcactttttactcaaaccaaaactcatcactacaagatccacaaccaaaaatggcgcttcgtgtcaagaccaacaagaagccatgttgggagatgaccaaggaggaactgacctctggcaaaactgaggtgttcaactatgaggaactcctggagtttgcagagggtgacatagctaaggtttttggtccggagtttgctgtcatagacaagtaccccagaagggtgaggctgcctgctcgtgaatacctgcttgtgacaagggtcacactcatggatgccgaggtcaacaactacagagttggtgccagaatggtcactgagtatgatcttccagtgaatggcgaattgtctgagggaggtgattgtccctgggcagttctggttgagagtggacagtgcgatttgatgctgatatcatacatgggaattgatttccagaaccaaggtgacagagtttaccgtctgctcaacaccacgttgacattctatggggttgcccatgagggagagacccttgagtatgacatcagagtgaccggttttgccaaacgtttggatggtggcatctccatgttcttctttgagtatgactgctatgtcaatgggaggcttctcattgagatgagagatggctgtgctggcttcttcacaaatgaggagcttgatgcgggaaagggtgtggtgttcacaagaggggatttggctgccagagctaagattccaaagcaagatgtttctccctatgctgtcgctccctgccttcacaaaacaaaactcaacgaaaaggagatgcagaccttggttgacaaagattgggcttccgtttttggctcaaagaatggcatgccggagatcaactacaaactctgcgcacgtaagatgctcatgattgatagagtcaccagcattgaccataagggaggtgtgtacggtttgggtcagttggttggtgagaaaatcttggagagggaccattggtacttcccatgccattttgttaaggatcaagtcatggctggatctcttgtcagcgacggttgttcacaaatgctcaagatgtacatgatctggctcggtttgcaccttaccaccggaccatttgacttcagacccgtcaacggacacccgaacaaagttaggtgtaggggtcagatatctcctcataagggaaagttggtctacgtcatggagatcaaagagatgggattcgacgaggataacgatccgtacgccattgctgacgtcaacatcattgacgttgatttcgaaaagggtcaagatttcagccttgatagaatcagcgactacggaaagggggatcttaacaaaaagatcgtcgtggacttcaagggcattgctctcaagatgcagaagagatccacgaacaagaacccctccaaagttcagcccgtttttgctaacggtgcagccactgtgggaccggaagcgtccaaggccagctctggtgccagtgctagtgcttctgctgcccctgcgaagcctgctttctcagcagatgttcttgcgccaaagccagttgcacttcctgaacatatcctcaagggtgacgctctcgctccgaaagaaatgtcctggcatcccatgtcaaaacttcctggcaacccgacgccgttcttctcccctagttcttaccctccgagggcaatttgcttcatccctttccctggcaacccacttgacaacaattgcaaagctggagaaatgcctctgaactggtacaacatgtcagagttcatgtgtggaaaagttagcaactgcttgggaccagagttcgcaagatttgataagtcaaatacgagcagaagccctgcttttgatttggctcttgtgactagagttgttgaagtcacaaacatggaacatggcaagttcctgaatgttgattgcaatcccagcaaaggcacaatggtgggggagtttgactgtcctcaagatgcgtggttctttgatggttcttgcaatgatgggcacatgccttattccatcatcatggaaatcggacttcagacatccggtgttctcaccagtgtgttgaaagcaccactgacgatggacaaagatgacattctctttaggaaccttgatgcaagtgctgaaatggtgaggccagatgtggatgtgagggggaaaaccataaggaatgtgaccaagtgcactggatatgcaatgttgggaaagatggggattcacagattcacgtttgagttgtctgttgatggcgtggttttctacaaaggaagcacttcctttggatggttcactccagaggtgtttgctcagcaagctggacttgacaatgggaaaaagacggagccttggtgcaaaactaacaacacgagtgtgagaagagttgaaatcgcatcagccaaaggcaaagaacagctgactgagaaacttccagatgcaactaatgctcaagttctcagaaggtcagaacagtgtgagtatttggattacctcaacattgctcctgattctgggctgcatgggaaaggatatgcgcatggacacaaagatgttaacccacaagactggttcttctcttgtcacttttggtttgatcctgtgatgcctggatctttgggaattgagtcaatgttccagctcattgaggcatttgcggtggaccagaacataccgggagaatacaatgtgagcaatccgacctttgcccatgcccctggaaaaacggcgtggaagtaccgtggtcaattgacaccaaagaaccgtgcgatggactgtgaggtgcacatagtttcaatcacagcctctcctgaaaatggaggctacgttgacatagtggcagatggagcactttgggttgatggtctccgtgtgtatgaagccaaagaactcagagttcgtgttgtcagtgcaaaacctcaagccattccggatgttcaacaacagccacccagcgcaaaagcggaccctgggaaaactggagttgcactcagtccgactcagttgagagatgtcctgcttgaagtggacaatccattgtatcttggtgttgaaaactccaatttggtgcagtttgaatccaaacctgcaacttcttcaaggattgtcagtatcaaaccatgctccataagtgatcttggtgacaagtccttcatggaaacgtacaatgtgtcagcacctctgtacactggagcaatggccaagggaattgcgtctgcggaccttgtcattgctgctgggaagaggaagatattgggttcttttggagcgggtgggcttccaatgcaccatgtgagggcagctttggagaagatacaagcggctctgcctcaaggaccatatgctgtgaacctcattcattcaccttttgacagcaacttggaaaaggggaatgttgatctcttcctcgaaaagggcgttactgtggtggaggcttctgcattcatgaccctcactccccaagttgttcgttaccgtgcagccggactctcaaggaacgctgatgggagtgtcaacatcagaaaccgtatcattggaaaagtgtccagaacagaactcgccgaaatgttcatcagaccggctccggaacacctccttgagaaactcatagcttctggtgagataacacaagaacaagccgaacttgcccgtcgtgttcctgtcgcagacgacatcgctgttgaagctgattctggtggtcacactgacaaccgtcccatccacgtcatcttgcctttgatcatcaaccttaggaacagactgcacagagagtgtggttatcctgcgcaccttagagtcagagttggagctggaggcggtgttggctgcccacaagctgctgcggctgccctcacaatgggagctgccttcatagtgactgggactgtcaatcaagttgctaaacagtccgggacatgtgacaacgtgagaaaacaactcagtcaagccacctacagtgacatttgcatggctccagcagctgatatgtttgaggaaggtgtgaaactccaagttctcaagaagggaacaatgttcccatcaagagctaacaaattgtacgaactcttttgcaagtacgactctttcgattcaatgcctcctgctgaacttgaaaggatcgagaagaggatcttcaagagggcacttcaagaggtctgggaagagaccaaggacttttacatcaatggtttgaagaatccagagaagatacagagagcggaacatgaccccaaactcaagatgtctttgtgtttcagatggtatcttggtcttgcatcacgttgggccaacatgggtgctcctgatcgtgtcatggactatcaagtctggtgtggtccagccattggagccttcaatgacttcatcaaaggaacatatcttgatcctgctgtctctaatgagtacccatgtgttgtccagatcaaccttcagattttgcgtggtgcatgttacctgaggcgtcttaatgctctgagaaatgatccgaggattgatcttgagactgaagatgctgcctttgtctatgagccaacgaatgcgctttgagtagttagcttaatcacttaggtcaccattccaaacgaaatatcctcgagagtgtgtataccacggtgatatgagtgtggttgttgatgtatgttaacactacatagtcatggtgtgtgttccataaataatgtactaatgtaataagaactactccgtagacggtaataaaagagaagtttttttttttactcttgctactttcctataaagtgatgattaacaacagatacaccaaaaagaaaacaattaatctatattcacaatgaagcagtactagtctattgaacatgtcagattttctttttctagatgtctaatcaagccttcaaggctagtgataaaagatcatccaatgggatccaacaaagactcaaatctggttttgatcagatacttcgaaactatttttgtatgcactaaattatgcaagtgttcttttatttggtgaagactctttagaagcaaagaacgataagcagtaataaaaaaaataaagttcagttttaagatttgttattgacttagcggccgcttaattaaactagtgctagcctcgaggtcgacacaactttgtataataaagttgtctagacctaggagctgtgctgggtaactcacatgagtcactggtcacatcagcggccgcagcttatagtaaagatttttttgttaataaaatgaaagttaatatttatggatttatttgaacatatttacaagtttttgttaataaatttatttacagaagtgttaaatttgaaaatgtgttaaatgagagttaatatttatggatataatattactttatttaaaaataaaatgaatttatattaaaatatgatttggtaaaagatattataaagaggaacttggatgagaaagacgacgatgggcaaaagttgcatggcacaccgcttttgttcagtaacatctgcactgtggcgcctttttcacactcaccatgcatgctgccacgtcagctttcacactatgacaccactggccatacacgttgccacctcagctttctcctcttctcactatgacacgactggccatgcatgcatgcatgctgccacctcagctcccgcctcttcacccgtgtctttctctcatgtcgcagtgctgcgtgccaacctcttctctctataaatagagagaagagaatgatggttaaactcaaaccaaaacaagaaaacatacacaaatagcaaaacggatccacaaccaaaaatgcttcagcacacttggcttccgaagcctcccaatctgaccctcttgtcagatgaggttcatctctggaggattcctcttgaccagcctgagtcacaacttcaagaccttgctgccaccctgagcagtgatgaattggcgagggcaaacagattctactttccagaacacagaaggcgtttcactgctgggagaggcatcctcagatccatcttgggtggatacttgggagtggaaccgggtcaagtcaagtttgattatgagtcccgtgggaaaccgatccttggtgacagatttgctgagagtggactcctgttcaacttgtctcacagccagaaccttgccttgtgtgctgtcaactacacgcgtcaaataggcattgatcttgaatatctgcgtccaacatctgacttggagtctcttgcaaagaggttctttctcccaagagaatatgaactcttgaggtcactccctgatgagcagaaacagaagattttctttcgttactggacttgcaaagaggcttatctcaaagcaacgggagatggaatagccaaacttgaagagatcgagatagcactcaccccaacagaacctgccaagctccaaacagctcctgcgtggtctctgttggagcttgtgccagatgacaattgtgttgcagctgtggctgttgcgggttttggttggcagcccaagttctggcattactgagtagttagcttaatcacttaggtcacccagtccaagcccggcctagcacgatgatcatgagtgttgctattgatgtatgttaatactatacacagtcatcgtgtgtgttttataaaactgtaagcttaggatgtttgaggctaatgtaattagcactacaccgtaataaatgagaggtttactttatgttttaataatgttcttacccttgctgctctctaaactgtaatggcgtacggttagctaaactaaagtaaaaatcgattcgcttgagtaaaattagtgaccgggaaagatcatcgactactactgctcagagatgtaatcggtaattaagacttcaagctcaataattaattaggagtaaatctggcttcgaatttttaaattgtcaacttccaaagaaggattggcaagactcaatctcaattgcccaacaaacatatggctctttacaaatttggaatctctttttgatggcaagaacgtcgtaattcctctgtcgatctcatgtaattaccaaactcatctacttattactttctttatatgcacttactgatgcggccgcttaattaactactgtcactgaggccgtagacgagtacggactgatctaactagtgctagcctcgaggtcgacacccagctttcttgtacaaagtggttgcggccgcttaattaaatttaaattcaattaatgcaatcttgattttcaacaacgaaggtaatggcgtaaaagaaaaaatgtatgttattgtattgatctttcatgatgttgaagcgtgccataatatgatgatgtataattaaaatattaactgtcgcattttattgaaatggcactgttatttcaaccatatctttgattctgttacatgacacgactgcaagaagtaaataatagacgccgttgttaaagaattgctatcatatgtgcctaactagagggaatttgagcgtcagacctaatcaaatattacaaaatatctcactctgtcgccagcaatggtgtaatcagcgcagacaaatggcgtaaagatcgcggaaaaacctccccgagtggcatgatagctgcctctgtattgctgatttagtcagccttatttgacttaagggtgccctcgttagtgacaaattgctttcaaggagacagccatgccccacactttgttgaaaaacaaattgcctttggggagacggtaaagccagttgctcttcaataaggaatgtcgaggaggcaatgtaaccgcctctggtagtacacttctctaatccaaaaatcaatttgtattcaagataccgcaaaaaacttatggtttaaaccctgcaggactagtccagaaggtaattatccaagatgtagcatcaagaatccaatgtttacgggaaaaactatggaagtattatgtaagctcagcaagaagcagatcaatatgcggcacatatgcaacctatgttcaaaaatgaagaatgtacagatacaagatcctatactgccagaatacgaagaagaatacgtagaaattgaaaaagaagaaccaggcgaagaaaagaatcttgaagacgtaagcactgacgacaacaatgaaaagaagaagataaggtcggtgattgtgaaagagacatagaggacacatgtaaggtggaaaatgtaagggcggaaagtaaccttatcacaaaggaatcttatcccccactacttatccttttatatttttccgtgtcatttttgcccttgagttttcctatataaggaaccaagttcggcatttgtgaaaacaagaaaaaatttggtgtaagctattttctttgaagtactgaggatacaacttcagagaaatttgtaagtttgtaggtaccagatctggatcccaaaccatgtctccggagaggagaccagttgagattaggccagctacagcagctgatatggccgcggtttgtgatatcgttaaccattacattgagacgtctacagtgaactttaggacagagccacaaacaccacaagagtggattgatgatctagagaggttgcaagatagatacccttggttggttgctgaggttgagggtgttgtggctggtattgcttacgctgggccctggaaggctaggaacgcttacgattggacagttgagagtactgtttacgtgtcacataggcatcaaaggttgggcctaggatctacattgtacacacatttgcttaagtctatggaggcgcaaggttttaagtctgtggttgctgttataggccttccaaacgatccatctgttaggttgcatgaggctttgggatacacagcccggggtacattgcgcgcagctggatacaagcatggtggatggcatgatgttggtttttggcaaagggattttgagttgccagctcctccaaggccagttaggccagttacccaaatctgagtagttagcttaatcacctagagctcgatcggcggcaatagcttcttagcgccatcccgggttgatcctatctgtgttgaaatagttgcggtgggcaaggctctctttcagaaagacaggcggccaaaggaacccaaggtgaggtgggctatggctctcagttccttgtggaagcgcttggtctaaggtgcagaggtgttagcgggatgaagcaaaagtgtccgattgtaacaagatatgttgatcctacgtaaggatattaaagtatgtattcatcactaatataatcagtgtattccaatatgtactacgatttccaatgtctttattgtcgccgtatgtaatcggcgtcacaaaataatccccggtgactttcttttaatccaggatgaaataatatgttattataatttttgcgatttggtccgttataggaattgaagtgtgcttgaggtcggtcgccaccactcccatttcataattttacatgtatttgaaaaataaaaatttatggtattcaatttaaacacgtatacttgtaaagaatgatatcttgaaagaaatatagtttaaatatttattgataaaataacaagtcaggtattatagtccaagcaaaaacataaatttattgatgcaagtttaaattcagaaatatttcaataactgattatatcagctggtacattgccgtagatgaaagactgagtgcgatattatggtgtaatacataggaattcgtttaaacgatctgcgtctaattttcggtccaacttgcacaggaaagacgtcgaccgcggtagctcttgcccagcagactgggcttccagtcctttcgctcgatcgggtccaatgttgtcctcagctgtgaaccggaagcggacgaccaacagtggaagaactgaaaggaacgagccgtctataccttgatgatcggcctctggtgaagggtatcatcgcagccaagcaagctcatgaaaggctgatgggggaggtgtataattatgaggcccacggcgggcttattctttagggaggatctatctcgttgctcaagtgcatggcgcaaagcagttattggagtgcggattttcgttggcatattattcgccacgagttagcagacgaagagaccttcatgaacgtggccaaggccagagttaagcagatgttacgccctgctgcaggcctttctattatccaatagttggttgatctttggaaagagcctcggctgaggcccatactgaaagagatcgatggatatcgatatgccatgttgtttgctagccagaaccagatcacatccgatatgctattgcagcttgacgcagatatggaggataagttgattcatgggatcgctcaggagtagctcatccatgcacgccgacaagaacagaaattccgtcgagttaacgcagccgcttacgacggattcgaaggtcatccattcggaatgtattagtttgcaccagctccgcgtcacacctgtcttcatttgaataagatgttagcaattgtttttagctttgtcttgttgtggcagggcggcaagtgcttcagacatcattctgttttcaaattttatgctggagaacagcttcttaattcctttggaaataatagactgcgtcttaaaattcagatgtctggatatagatatgattgtaaaataacctatttaagtgtcatttagaacataagttttatgaatgttcttccattttcgtcatcgaacgaataagagtaaatacaccttttttaacattacaaataagttcttatacgttgtttatacaccgggaatcatttccattattttcgcgcaaaagtcacggatattcgtgaaagcgacataaactgcgaaatttgcggggagtgtcttgagtttgcctcgaggctagcgcatgcacatagacacacacatcatctcattgatgcttggtaataattgtcattagattgtttttatgcatagatgcactcgaaatcagccaattttagacaagtatcaaacggatgtgacttcagtacattaaaaacgtccgcaatgtgttattaagttgtctaagcgtcaatttgatttacaattgaatatatcctgccccagccagccaacagctcgatttacaattgaatatatcctgccggccggcccacgcgtgtcgaggaattctgatctggcccccatttggacgtgaatgtagacacgtcgaaataaagatttccgaattagaataatttgtttattgctttcgcctataaatacgacggatcgtaatttgtcgttttatcaaaatgtactttcattttataataacgctgcggacatctacatttttgaattgaaaaaaaattggtaattactctttctttttctccatattgaccatcatactcattgctgatccatgtagatttcccggacatgaagccatttacaattgaatatatcctgccgccgctgccgctttgcacccggtggagcttgcatgttggtttctacgcagaactgagccggttaggcagataatttccattgagaactgagccatgtgcaccttccccccaacacggtgagcgacggggcaacggagtgatccacatgggacttttaaacatcatccgtcggatggcgttgcgagagaagcagtcgatccgtgagatcagccgacgcaccgggcaggcgcgcaacacgatcgcaaagtatttgaacgcaggtacaatcgagccgacgttcacgcggaacgaccaagcaagcttggctgccatttttggggtgaggccgttcgcggccgaggggcgcagcccctggggggatgggaggcccgcgttagcgggccgggagggttcgagaagggggggcaccccccttcggcgtgcgcggtcacgcgcacagggcgcagccctggttaaaaacaaggtttataaatattggtttaaaagcaggttaaaagacaggttagcggtggccgaaaaacgggcggaaacccttgcaaatgctggattttctgcctgtggacagcccctcaaatgtcaataggtgcgcccctcatctgtcagcactctgcccctcaagtgtcaaggatcgcgcccctcatctgtcagtagtcgcgcccctcaagtgtcaataccgcagggcacttatccccaggcttgtccacatcatctgtgggaaactcgcgtaaaatcaggcgttttcgccgatttgcgaggctggccagctccacgtcgccggccgaaatcgagcctgcccctcatctgtcaacgccgcgccgggtgagtcggcccctcaagtgtcaacgtccgcccctcatctgtcagtgagggccaagttttccgcgaggtatccacaacgccggcggccgcggtgtctcgcacacggcttcgacggcgtttctggcgcgtttgcagggccatagacggccgccagcccagcggcgagggcaaccagcccggtgagcgtcggaaagggtcgacggatcttttccgctgcataaccctgcttcggggtcattatagcgattttttcggtatatccatcctttttcgcacgatatacaggattttgccaaagggttcgtgtagactttccttggtgtatccaacggcgtcagccgggcaggataggtgaagtaggcccacccgcgagcgggtgttccttcttcactgtcccttattcgcacctggcggtgctcaacgggaatcctgctctgcgaggctggccggctaccgccggcgtaacagatgagggcaagcggatggctgatgaaaccaagccaaccaggaagggcagcccacctatcaaggtgtactgccttccagacgaacgaagagcgattgaggaaaaggcggcggcggccggcatgagcctgtcggcctacctgctggccgtcggccagggctacaaaatcacgggcgtcgtggactatgagcacgtccgcgagctggcccgcatcaatggcgacctgggccgcctgggcggcctgctgaaactctggctcaccgacgacccgcgcacggcgcggttcggtgatgccacgatcctcgccctgctggcgaagatcgaagagaagcaggacgagcttggcaaggtcatgatgggcgtggtccgcccgagggcagagccatgacttttttagccgctaaaacggccggggggtgcgcgtgattgccaagcacgtccccatgcgctccatcaagaagagcgacttcgcggagctggtattcgtgcagggcaagattcggaataccaagtacgagaaggacggccagacggtctacgggaccgacttcattgccgataaggtggattatctggacaccaaggcaccaggcgggtcaaatcaggaataagggcacattgccccggcgtgagtcggggcaatcccgcaaggagggtgaatgaatcggacgtttgaccggaaggcatacaggcaagaactgatcgacgcggggttttccgccgaggatgccgaaaccatcgcaagccgcaccgtcatgcgtgcgccccgcgaaaccttccagtccgtcggctcgatggtccagcaagctacggccaagatcgagcgcgacagcgtgcaactggctccccctgccctgcccgcgccatcggccgccgtggagcgttcgcgtcgtctcgaacaggaggcggcaggtttggcgaagtcgatgaccatcgacacgcgaggaactatgacgaccaagaagcgaaaaaccgccggcgaggacctggcaaaacaggtcagcgaggccaagcaggccgcgttgctgaaacacacgaagcagcagatcaaggaaatgcagctttccttgttcgatattgcgccgtggccggacacgatgcgagcgatgccaaacgacacggcccgctctgccctgttcaccacgcgcaacaagaaaatcccgcgcgaggcgctgcaaaacaaggtcattttccacgtcaacaaggacgtgaagatcacctacaccggcgtcgagctgcgggccgacgatgacgaactggtgtggcagcaggtgttggagtacgcgaagcgcacccctatcggcgagccgatcaccttcacgttctacgagctttgccaggacctgggctggtcgatcaatggccggtattacacgaaggccgaggaatgcctgtcgcgcctacaggcgacggcgatgggcttcacgtccgaccgcgttgggcacctggaatcggtgtcgctgctgcaccgcttccgcgtcctggaccgtggcaagaaaacgtcccgttgccaggtcctgatcgacgaggaaatcgtcgtgctgtttgctggcgaccactacacgaaattcatatgggagaagtaccgcaagctgtcgccgacggcccgacggatgttcgactatttcagctcgcaccgggagccgtacccgctcaagctggaaaccttccgcctcatgtgcggatcggattccacccgcgtgaagaagtggcgcgagcaggtcggcgaagcctgcgaagagttgcgaggcagcggcctggtggaacacgcctgggtcaatgatgacctggtgcattgcaaacgctagggccttgtggggtcagttccggctgggggttcagcagccagcgctttactggcatttcaggaacaagcgggcactgctcgacgcacttgcttcgctcagtatcgctcgggacgcacggcgcgctctacgaactgccgataaacagaggattaaaattgacaattgtgattaaggctcagattcgacggcttggagcggccgacgtgcaggatttccgcgagatccgattgtcggccctgaagaaagctccagagatgttcgggtccgtttacgagcacgaggagaaaaagcccatggaggcgttcgctgaacggttgcgagatgccgtggcattcggcgcctacatcgacggcgagatcattgggctgtcggtcttcaaacaggaggacggccccaaggacgctcacaaggcgcatctgtccggcgttttcgtggagcccgaacagcgaggccgaggggtcgccggtatgctgctgcgggcgttgccggcgggtttattgctcgtgatgatcgtccgacagattccaacgggaatctggtggatgcgcatcttcatcctcggcgcacttaatatttcgctattctggagcttgttgtttatttcggtctaccgcctgccgggcggggtcgcggcgacggtaggcgctgtgcagccgctgatggtcgtgttcatctctgccgctctgctaggtagcccgatacgattgatggcggtcctgggggctatttgcggaactgcgggcgtggcgctgttggtgttgacaccaaacgcagcgctagatcctgtcggcgtcgcagcgggcctggcgggggcggtttccatggcgttcggaaccgtgctgacccgcaagtggcaacctcccgtgcctctgctcacctttaccgcctggcaactggcggccggaggacttctgctcgttccagtagctttagtgtttgatccgccaatcccgatgcctacaggaaccaatgttctcggcctggcgtggctcggcctgatcggagcgggtttaacctacttcctttggttccgggggatctcgcgactcgaacctacagttgtttccttactgggctttctcagcccccgagcgcttagtgggaatttgtaccccttatcgaaccgggagcacaggatgacgcctaacaattcattcaagccgacaccgcttcgcggcgcggcttaattcaggagttaaacatcatgagggaagcggtgatcgccgaagtatcgactcaactatcagaggtagttggcgtcatcgagcgccatctcgaaccgacgttgctggccgtacatttgtacggctccgcagtggatggcggcctgaagccacacagtgatattgatttgctggttacggtgaccgtaaggcttgatgaaacaacgcggcgagctttgatcaacgaccttttggaaacttcggcttcccctggagagagcgagattctccgcgctgtagaagtcaccattgttgtgcacgacgacatcattccgtggcgttatccagctaagcgcgaactgcaatttggagaatggcagcgcaatgacattcttgcaggtatcttcgagccagccacgatcgacattgatctggctatcttgctgacaaaagcaagagaacatagcgttgccttggtaggtccagcggcggaggaactctttgatccggttcctgaacaggatctatttgaggcgctaaatgaaaccttaacgctatggaactcgccgcccgactgggctggcgatgagcgaaatgtagtgcttacgttgtcccgcatttggtacagcgcagtaaccggcaaaatcgcgccgaaggatgtcgctgccgactgggcaatggagcgcctgccggcccagtatcagcccgtcatacttgaagctaggcaggcttatcttggacaagaagatcgcttggcctcgcgcgcagatcagttggaagaatttgttcactacgtgaaaggcgagatcaccaaggtagtcggcaaataatgtctaacaattcgttcaagccgacgccgcttcgcggcgcggcttaactcaagcgttagagagctggggaagactatgcgcgatctgttgaaggtggttctaagcctcgtcttgcgatggcatttcgatccattcccattccgcgctcaagatggcttcccctcggcagttcatcagggctaaatcaatctagccgacttgtccggtgaaatgggctgcactccaacagaaacaatcaaacaaacatacacagcgacttattcacacgagctcaaattacaacggtatatatcctgccagtcagcatcatcacaccaaaagttaggcccgaatagtttgaaattagaaagctcgcaattgaggtctacaggccaaattcgctcttagccgtacaatattactcaccggatcctaaccggtttaattaaggcgcgccatgcccgggcaagcggccgcacaagtttgtacaaaaaagcaggcttctagacctaggtggagtcatcacgcagactatctcagcatgtgcgtagcacgcggccgcagcttatagtaaagatttttttgttaataaaatgaaagttaatatttatggatttatttgaacatatttacaagtttttgttaataaatttatttacagaagtgttaaatttgaaaatgtgttaaatgagagttaatatttatggatataatattactttatttaaaaataaaatgaatttatattaaaatatgatttggtaaaagatattataaagaggaacttggatgagaaagacgacgatgggcaaaagttgcatggcacaccgcttttgttcagtaacatctgcactgtggcgcctttttcacactcaccatgcatgctgccacgtcagctttcacactatgacaccactggccatacacgttgccacctcagctttctcctcttctcactatgacacgactggccatgcatgcatgcatgctgccacctcagctcccgcctcttcacccgtgtctttctctcatgtcgcagtgctgcgtgccaacctcttctctctataaatagagagaagagaatgatggttaaactcaaaccaaaacaagaaaacatacacaaatagcaaaacg

SEQ ID NO: 59 - DNA, 35494 bp, Artificial sequence
  plasmid pDAB101493
aattacaacggtatatatcctgccagtcagcatcatcacaccaaaagttaggcccgaatagtttgaaattagaaagctcgcaattgaggtctacaggccaaattcgctcttagccgtacaatattactcaccggatcctaaccggtttaattaaggcgcgccatgcccgggcaagcggccgcacaagtttgtacaaaaaagcaggcttctagacctaggtggagtcatcacgcagactatctcagcatgtgcgtagcacgcggccgcagcttatagtaaagatttttttgttaataaaatgaaagttaatatttatggatttatttgaacatatttacaagtttttgttaataaatttatttacagaagtgttaaatttgaaaatgtgttaaatgagagttaatatttatggatataatattactttatttaaaaataaaatgaatttatattaaaatatgatttggtaaaagatattataaagaggaacttggatgagaaagacgacgatgggcaaaagttgcatggcacaccgcttttgttcagtaacatctgcactgtggcgcctttttcacactcaccatgcatgctgccacgtcagctttcacactatgacaccactggccatacacgttgccacctcagctttctcctcttctcactatgacacgactggccatgcatgcatgcatgctgccacctcagctcccgcctcttcacccgtgtctttctctcatgtcgcagtgctgcgtgccaacctcttctctctataaatagagagaagagaatgatggttaaactcaaaccaaaacaagaaaacatacacaaatagcaaaacggatccacaaccaaaaatggcagcgaggctgcaagagcagaaaggaggtgagatggacacgaggattgcgatcataggcatgagcgccatacttccttgtggaaccacggtgagagagtcatgggagaccataagggctggcattgattgcctgtctgatcttcctgaggatcgtgttgatgtgactgcgtactttgacccagtcaagaccacaaaggacaaaatctactgcaagagaggaggtttcattcctgagtatgactttgatgcgcgtgagtttggtctcaacatgttccagatggaagattctgatgcgaatcagaccatctcacttctcaaggtcaaagaagcacttcaagatgctgggattgatgcacttggaaaggagaagaaaaacataggatgcgtgcttggcattggaggtggacagaagagttcacatgagttctacagcagactcaactatgtggttgtggagaaagtcttgagaaagatggggatgccagaggaagatgtcaaagtggctgtggagaagtacaaagcgaacttcccagaatggagacttgactctttccctggattccttgggaatgtcactgctggcagatgcaccaacacattcaacttggatggcatgaactgcgttgtggatgctgcatgtgcaagctccttgatagcagtcaaggttgcgattgatgaactgctctatggtgactgcgacatgatggtcactggtgcaacctgcacagacaactccattgggatgtacatggctttctcaaagacacctgtgttcagcacggacccaagtgtgagagcgtatgatgagaaaacgaaagggatgctcattggtgagggatcagccatgttggtgctcaaacgttatgcagatgcagtgagggatggtgatgagattcatgctgtgattcgtggttgtgcaagctcaagtgatggcaaagcagctggcatctacactcccacaatcagtggtcaagaggaagccttgagacgtgcatacaatcgtgcctgcgttgaccctgccactgtcactttggttgagggtcatgggactggcactccagttggagataggattgagttgactgcgttgaggaacttgtttgacaaagcgtatggtgaagggaacacagagaaagttgcagttggaagtatcaagtccagtattggtcatttgaaggctgttgctggtcttgctggaatgatcaaggtcatcatggctctcaaacacaagactttgcctggaacgatcaatgtggacaatccacccaatctctatgacaacactcccatcaatgagtcatccctctacatcaacacgatgaacagaccctggttccctccacctggtgttccgagacgtgctggaatatccagctttggctttggaggtgccaactaccatgcagtgttggaagaggctgaaccagagcacacgacagcgtacagactcaacaaacgtccacaaccggtgttgatgatggctgcaactcctgctgcgttgcagagcctttgtgaagctcagctgaaagagtttgaagctgcgatcaaggagaatgagacagtcaagaatactgcctacatcaagtgtgtcaagtttggagaacagttcaagttccctgggagcatacctgcgaccaatgcgagactgggattcttggtcaaagatgcggaggatgcgtgctccacgcttcgtgctatatgtgctcagtttgccaaagatgtgaccaaagaagcgtggaggcttccgagagaaggagtttctttccgtgccaaaggcattgccaccaatggtgctgttgctgcactcttctctggacaaggtgctcagtacacacacatgttcagtgaagttgcgatgaactggcctcagttcagacagtccattgctgcaatggacgctgcacagtccaaggttgctggaagtgacaaagactttgaaagagtctctcaagtcctgtacccaaggaaaccgtacgaacgtgagccagaacaagatcacaagaaaatctcactcacagcatacagccagccgtcaaccctggcatgtgctcttggtgcctttgagattttcaaggaagctggattcactccagactttgcagctggacacagcttgggtgagtttgctgcgctctatgcagctggttgtgttgacagagatgagttgtttgaacttgtttgcagaagggcaaggatcatgggaggcaaagatgcacctgccacacccaaaggttgcatggcagctgtcataggacccaacgcagagaacatcaaggttcaagctgccaacgtctggcttggaaactcaaactctccgtctcagactgtcattactgggtctgttgaagggattcaagctgaaagtgccagattgcagaaggaagggttcagagttgtgcctcttgcttgtgagtctgccttccattctccacagatggaaaatgccagctcagctttcaaagatgtcatatccaaggtttccttccgtacacccaaagcagaaacaaagctcttcagcaatgtttctggagagacctatccgacggatgccagagagatgctcactcaacacatgacctcatctgtgaagttcctgacccaagtgaggaacatgcaccaagctggtgcgagaatctttgttgagtttggaccgaaacaagttctcagcaaacttgtttctgaaaccctcaaagatgacccgtctgttgtcacagtgtctgtgaacccagcttctggcacggactctgacatacagttgagggatgctgcagttcagctggttgtggctggtgtcaatcttcaagggtttgacaagtgggatgctcctgatgccacgaggatgcaagccatcaagaaaaagagaaccacactcagactttcagctgccacctatgtcagtgacaagaccaagaaagtgagggatgctgccatgaacgacggaagatgtgtcacatacctcaagggtgctgcaccactcatcaaggctcctgaacctgtggttgacgaagctgccaagagggaggctgaaaggcttcagaaggagcttcaagacgctcagaggcagcttgacgacgccaaacgtgcagctgcagaagccaactccaaacttgctgctgccaaggaggaagccaagactgctgcagcttcagccaagcctgcagttgacactgctgttgtggagaaacatcgtgccatcctcaagtccatgctggctgagctggatggttatggaagtgttgatgcttcttcccttcagcaacagcaacagcaacagactgctccggcgcctgttaaagccgctgcccctgccgctcccgttgcaagtgctcctgctcccgccgtgtccaacgagttgcttgagaaagctgagacagttgtgatggaggttctcgctgccaagactggatacgaaacagacatgattgaggcggacatggagcttgagactgagttgggaattgacagcatcaagagggttgaaattctttctgaagtccaagctatgcttaacgttgaggcgaaagatgttgatgctctctctaggacgagaacagtgggtgaagttgtcaacgctatgaaggcagaaatcgctggttcttccgctccggcgccggcagctgccgcacctgcaccggctaaagcggctccagctgcagctgcaccagctgtttctaatgagctgctcgaaaaggcagaaactgttgtgatggaagtccttgctgccaaaactggctacgaaactgacatgatagaatcagacatggagcttgagacggagcttggaattgattccatcaagcgtgtggaaatcctcagtgaagtccaagccatgctcaatgtggaagctaaggatgtggatgctctctcaaggaccagaactgtcggtgaggttgtcaatgccatgaaggctgagatagctggaggctccgctcctgcgccggccgctgccgctcctggtcccgctgccgcggctccagctccagctgcagccgctccggccgtctcaaacgaactccttgaaaaagctgagaccgtcgtgatggaggtcttggcagctaaaaccggctatgagactgacatgattgagtctgacatggaattggagacagaacttgggatagacagcatcaaacgtgttgaaatcctcagtgaggtccaagctatgctgaacgtggaagcgaaggatgttgatgctctgtccagaacgaggaccgttggtgaggttgtggatgccatgaaggctgaaattgctggagggtctgcgcccgcgccagctgcagccgctcctgcacccgcagccgcggcacctgctccagctgcacctgcacctgccgtttcttcagaactcttggagaaggctgagacggttgtgatggaggttttggctgcaaagactggctatgagaccgacatgattgaatctgatatggaattggagacagagcttgggatcgattccatcaaaagagtggagatcctgagtgaagtccaagccatgctcaatgttgaagctaaggatgttgatgcactttcaagaacaaggacagtgggtgaggttgtggatgccatgaaggcggagattgctggagggagcgcgcctgcgccagctgccgcggcacctgcaccggcagccgcagctccagctccagctgcaccagcaccggccgcgcccgcgccagctgtttcatccgaactcctggaaaaggccgagacggttgtgatggaggtgctcgcagctaagactggttacgagaccgacatgattgaaagtgacatggagcttgaaaccgagttgggaatagatagcatcaaacgtgttgaaatcttgtctgaggtccaagctatgttgaacgtggaggcaaaagatgtcgatgcgctttcaagaaccagaacagtcggtgaggtcgtggacgccatgaaggctgaaattgccggaagctctgctagtgcgccagctgcagccgcacctgcacctgctgccgcggcacctgctccagctgcagccgctcctgccgtcagcaatgagttgctggagaaagccgaaacagttgtgatggaagtccttgctgcaaaaactggttacgaaacggacatgattgagtcagacatggaattggagaccgaacttggaatagattccatcaagagagtggagatcctctctgaggtgcaagccatgctcaacgttgaggctaaagatgttgatgcactcagtaggacaagaactgtgggggaagttgtcgatgcgatgaaggctgagattgctggaggctctgctcctgcgccggcagctgccgcacctgcacccgcagccgcggcaccagctgtcagcaacgaattgcttgagaaggctgaaacagttgtcatggaagtgctggctgcaaaaaccggctatgagactgacatgattgagtctgacatggaacttgagacggaattgggcattgacagcatcaagcgtgttgagatcctcagtgaagtccaagcaatgctcaatgtggaggctaaggatgtggatgccctctcaaggaccagaacagttggtgaggtcgttgatgcgatgaaggcggagatcgctggaagttccgcgcctgcgccagctgcagccgctcctgcacccgcagccgcggcaccggctccagctgcagccgcaccggccgtctcctcagaactcctggaaaaggctgagacagttgtgatggaagtccttgctgcgaaaactggctatgagaccgacatgattgaatctgacatggaactggagaccgagcttggaattgactccatcaaacgtgttgaaatcctctctgaggttcaagcgatgttgaatgtggaggccaaagatgttgatgctctttccagaacaaggacggtgggagaggtggttgatgccatgaaggctgagatagctgggggttctgctcctgcgccagctgcagccgctcctgctcccgctgccgcggcaccagctgtcagcaacgaactccttgaaaaagctgaaactgttgtgatggaggttttggctgcaaagactggatacgagactgacatgatagagtcagacatggagttggaaacagagcttgggattgatagcatcaagcgtgtggaaatcctttctgaggttcaagccatgctgaacgttgaggccaaagatgtcgatgctttgtcaaggaccagaacggttggagaagtggtcgatgccatgaaggctgagatagctggtggatcagcccctgctccggctgcagccgctcctgcaagtgccggtgctgcaccagctgtgaagattgattcagttcatggtgctgactgtgacgatttgtcactgatgcacgcaaaggtggttgacatcagaaggccagatgaactgattctggaaagaccggagaaccgtccagttcttgtcgttgacgatggctcagagttgacacttgctcttgtgagggtgttgggagcctgtgcagttgtcttgacctttgagggattgcagttggctcagagagctggtgcagctgccattcgtcatgttctggctaaggacctttcagcagaatcagctgagaaggccatcaaagaggctgagcaaagatttggagcgttgggaggcttcataagccagcaagcagaaaggtttgaaccagctgagatactgggtttcacactcatgtgtgcgaagtttgccaaagcctctctctgcactgctgtggctggaggtcgtcctgccttcatcggtgtggctaggcttgacggcagacttggattcacctctcaaggcacttctgacgcactcaagagagcacagcgtggagcgatctttggactctgcaagacaatagggttggagtggtcagaatctgatgtgttcagccgtggtgtggacattgctcaagggatgcacccagaagatgctgcagttgccatagttagggagatggcgtgtgctgacatcagaatcagagaggttgggattggagcaaaccagcaaagatgcacaatcagagctgccaagttggagactgggaaccctcagagacagatagcgaaagacgatgtgcttctggtttctggaggtgctcgtgggatcacacctctttgcatccgtgagatcacgcgtcagattgctggaggcaagtacattctgttgggtcgtagcaaagtttctgcgtctgaaccagcatggtgtgctggcatcactgatgagaaggctgtgcagaaagctgccacccaagagttgaagagggccttcagtgctggtgaaggacccaaacccactccaagggctgtcacgaaacttgtgggatctgttcttggtgctcgtgaagtgagaagctccattgctgccattgaagctctgggtggcaaagcgatctacagctcttgtgatgtgaactctgctgcagatgttgccaaagcagttagggatgcagagtcccagcttggtgccagagttagtggaatcgttcacgcttctggtgtgctccgtgatcgtctcatagagaagaaactccctgacgagtttgatgctgtctttgggaccaaagtcactgggttggagaatcttctggctgcagttgatcgtgccaacctcaaacacatggttctcttcagctcccttgctggtttccacggcaatgttggtcagtctgactatgcgatggcaaacgaagctctcaacaagatgggtttggaacttgcgaaggatgtcagtgtcaagtccatctgctttggtccctgggatggtgggatggtgacacctcaactcaagaaacagtttcaagaaatgggagttcagatcattcctcgtgaaggaggtgctgatacagttgcgaggattgtgttgggatcaagtcctgctgagatccttgttggaaactggaggacaccatccaagaaagttggaagtgacacgatcaccctgcatagaaagatcagtgccaagtccaatcccttcttggaggatcatgtcatacaaggcagaagggtgttgccaatgacccttgctattgggagccttgctgagacctgccttggactcttccctggctactctctctgggccatagatgacgcacagctcttcaaaggtgtcactgttgatggagacgtcaactgtgaagtgaccctcacaccgtccactgctccgagtgggagggtgaatgtccaagcgacgctcaagacgttctcaagtggaaaacttgttccagcctacagagctgtcatagtgttgtccaaccaaggtgctccacctgccaatgcaaccatgcagcctccgagccttgatgcagatcctgctttgcaagggtcagtctatgatggcaagactctctttcatggtcctgcgttcagaggcattgatgacgttctcagctgcaccaagagccagcttgttgccaagtgttctgctgttcctggatcagatgcagccagaggagagtttgcaactgacactgatgcacatgatccctttgtcaatgatcttgcctttcaagcaatgttggtctgggtgaggagaacgctgggacaagctgcactcccgaactccattcagaggatagtccaacacagaccggtcccacaagacaaacccttctacatcaccctcagatccaatcagagtggtggacatagccagcacaaacatgcacttcagttccacaacgaacaaggtgatctcttcattgatgttcaagcctctgtcattgcgacagactcacttgcgttctgagtagttagcttaatcacttaggtcacccagtccaagcccggcctagcacgatgatcatgagtgttgctattgatgtatgttaatactatacacagtcatcgtgtgtgttttataaaactgtaagcttaggatgtttgaggctaatgtaattagcactacaccgtaataaatgagaggtttactttatgttttaataatgttcttacccttgctgctctctaaactgtaatggcgtacggttagctaaactaaagtaaaaatcgattcgcttgagtaaaattagtgaccgggaaagatcatcgactactactgctcagagatgtaatcggtaattaagacttcaagctcaataattaattaggagtaaatctggcttcgaatttttaaattgtcaacttccaaagaaggattggcaagactcaatctcaattgcccaacaaacatatggctctttacaaatttggaatctctttttgatggcaagaacgtcgtaattcctctgtcgatctcatgtaattaccaaactcatctacttattactttctttatatgcacttactgatgcggccgcttaattaagatgagtgatactcaggactcaggactcactctgctgatcactagtgctagcctcgaggtcgacacaactttgtatacaaaagttgtctaggatctgcttttacatgcgagacacatcttctaaagtaattttaataatagttactatattcaagatttcatatatcaaatactcaatattacttctaaaaaattaattagatataattaaaatattacttttttaattttaagtttaattgttgaatttgtgactattgatttattattctactatgtttaaattgttttatagatagtttaaagtaaatataagtaatgtagtagagtgttagagtgttaccctaaaccataaactataagatttatggtggactaattttcatatatttcttattgcttttaccttttcttggtatgtaagtccgtaactggaattactgtgggttgccatgacactctgtggtcttttggttcatgcatggatcttgcgcaagaaaaagacaaagaacaaagaaaaaagacaaaacagagagacaaaacgcaatcacacaaccaactcaaattagtcactggctgatcaagatcgccgcgtccatgtatgtctaaatgccatgcaaagcaacacgtgcttaacatgcactttaaatggctcacccatctcaacccacacacaaacacattgcctttttcttcatcatcaccacaaccacctgtatatattcattctcttccgccacctcaatttcttcacttcaacacacgtcaacctgcatatgcgtgtcatcccatgcccaaatctccatgcatgttccaaccaccttctctcttatataatacctataaatacctctaatatcactcacttctttcatcatccatccatccagagtactactactctactactataataccccaacccaactcatattcaatactactctaggatccacaaccaaaaatggctgcaaggaacgtgagtgcggctcatgagatgcatgacgagaagaggatagctgttgtgggcatggctgttcagtatgctggatgcaaaacgaaagacgagttctgggaagttctcatgaatggaaaagttgagagcaaagtgatcagcgacaaacgtcttggttcaaattaccgtgctgaacactacaaagctgaaaggagcaagtatgctgacaccttctgcaatgagacatatggaactcttgatgagaacgaaatagacaatgagcatgaactccttttgaaccttgccaaacaagccttggctgaaacatctgtcaaagattcaacaagatgtggcatagtttctggatgcctcagcttcccgatggacaacctccaaggtgaactcttgaatgtgtaccagaaccatgttgagaagaaacttggtgccagagttttcaaagatgcctctcactggtcagaaagagaacagtccaacaaaccagaggctggtgacagaagaatcttcatggaccctgcttcctttgttgctgaggaactcaatcttggcgctctccactactctgttgatgctgcctgtgccactgcgctctatgtgctcagactggcgcaagatcacttggtctctggtgcagctgatgtgatgctttgtggtgcaacatgcctgccggagccgtttttcatactctctgggttctcaaccttccaagccatgcctgttggaacgggtcagaatgtgtccatgccgctgcacaaagattctcaaggattgacccctggtgaaggaggttccatcatggtcctcaaacgtttggatgacgcaatcagagatggagatcacatctatggaacacttttgggagccaatgtcagcaacagtggcactggtctgccacttaaaccccttttgccgtcagagaaaaagtgcctcatggacacctacacacgtatcaatgtgcatccccacaagattcagtatgttgaatgccatgcaactgggactccacaaggtgatcgtgtggaaattgatgctgtgaaggcttgctttgaaggcaaagtcccacgttttggaaccacaaaagggaactttggacacacattggtggcagctgggtttgctggcatgtgcaaagtgcttctctccatgaagcacgggatcattccacccactccgggaatagatgacgaaacgaagatggaccctctggttgtctctggtgaggccattccctggccagaaacgaatggagaaccgaagcgtgctggtctctcagcgtttggatttggtgggaccaatgctcatgctgtctttgaggaacatgacccaagcaatgctgcatgcactggccatgactccatttctgctctctctgcacgttgtggtggtgagtcaaacatgagaatagcaatcactgggatggatgccacttttggtgctttgaaaggattggatgcttttgaaagggccatctacactggtgctcatggtgctataccactcccagaaaagagatggagattcctggggaaagacaaggacttccttgatctttgtggagtcaaagcaacaccgcatggctgttacattgaagatgttgaagttgatttccagaggctgaggactccaatgactcctgaagatatgctcttgcctcaacagcttctggctgtcaccacaattgatagggccatattggactctggcatgaagaaaggtggaaatgtggctgtctttgtggggttggggaccgatcttgaactctaccgtcaccgtgcaagggttgctctcaaggagagagtgaggcctgaagccagcaagaaactcaatgacatgatgcagtacatcaatgattgtgggacaagcacttcttacaccagctacataggcaacttggttgcaacaagggtcagttcacaatggggcttcacgggaccttccttcacaatcacagaaggcaacaattctgtgtacagatgtgctgaacttggcaaatacctcttggaaacgggagaggttgatggggttgtggttgcgggtgttgatctctgtgggagtgctgagaacctttacgtcaagtcaaggcgtttcaaggtgtctacatctgacaccccgagagccagctttgatgcagctgctgatggttactttgttggagagggctgtggtgcatttgtgctcaagcgtgagacaagctgcaccaaggatgacagaatctatgcttgcatggatgccatagttcctggaaatgttccatctgcatgtttgagagaggcattggatcaagccagagtcaagcctggagacatcgagatgttggagctttctgctgattcagcgaggcatttgaaggacccgtctgttctcccaaaggaactcactgctgaggaagagattggcggacttcagacgattcttcgtgacgatgacaagctcccaaggaatgttgcaactggaagtgtcaaggccactgttggtgacactggttatgcttctggtgctgccagtttgattaaggctgcgctttgcatctacaaccgttacctgcccagcaatggagatgactgggatgaacctgcacctgaagcaccctgggacagcacactctttgcgtgccagacctcaagagcttggttgaagaaccctggtgagagacgttatgcggctgtttccggagtcagtgaaaccagaagttgctacagtgtgctgctttctgaagcagagggacactacgagagagagaacagaatcagtttggatgaggaagcacccaagctcattgtgttgagagcagactcccatgaagagattcttggaagattggacaagataagggaaaggttcttgcagcccacgggtgctgcacccagagagtctgaattgaaggcgcaagcccgtaggatctttcttgaactccttggtgagacccttgcccaagatgcagcttcatctggaagtcagaagccccttgctctcagcttggtctccactccatccaagctccagagagaggtggaacttgcggcaaaaggcattccgagatgtctcaagatgagacgtgattggagttcccctgctggaagcagatatgcgcctgagcctttggccagtgacagagttgccttcatgtatggagaaggaaggagcccttactatggcatcacacaagacattcataggatttggcctgaacttcatgaggtcatcaatgagaaaacaaaccgtctctgggctgaaggtgacagatgggtcatgccaagggccagcttcaagagtgagcttgagtcacaacagcaagagtttgacagaaacatgattgaaatgttccgtcttggaatcctcacctcaattgccttcacaaacctggcgagagatgttctcaacatcacgcccaaagcagcctttggactcagtttgggagagatttccatgatctttgctttctccaagaaaaacggtttgataagcgatcagttgacaaaggatttgagagagtcagatgtctggaacaaagctctggctgttgagttcaatgcgctcagagaagcctggggcattccacagtctgtcccaaaagatgagttctggcaaggttacatagtgaggggaacgaaacaagacatagaagcagccatagcaccagactcaaagtatgtgaggttgaccatcatcaatgatgccaacactgctctcatcagtggaaagcctgatgcatgcaaagctgcgattgctcgtcttggtggcaacatccctgcgcttccagtcactcaaggcatgtgtgggcattgcccagaggtgggaccttacaccaaggacatcgcaaagatccacgccaaccttgagttccctgtggttgatggtcttgatctctggactaccataaaccagaagaggcttgtgccaagagccacgggtgccaaagatgaatgggctccttcatcctttggggagtatgctggacagctctatgagaaacaagccaacttccctcagatagttgaaaccatctacaagcagaactatgatgtgtttgttgaagttgggccaaacaatcacagaagcacagcagtgagaaccacgcttggaccacagagaaaccaccttgctggtgccatagacaagcagaacgaggatgcttggacgacaatagtcaagctcgtggcttcattgaaggctcaccttgttcctggagtgaccatcagtccgctctaccactccaagctcgttgcagaggctgaggcttgttatgctgcgctctgtaaaggtgagaaacccaagaaaaacaagtttgtgagaaagattcagttgaatggcagattcaacagcaaggcagaccccatctcctcagcagaccttgcatccttcccacctgcggaccctgcgattgaagctgccatctcttcaaggatcatgaagcctgtggctccgaaattctatgcgcgtctcaacattgatgagcaagatgagaccagagatccgatcttgaacaaggacaatgcgccttccagctccagctcttccagcagttcctcttccagcagttcatctccgtctcctgctccttcagctccagttcagaagaaagctgccccagctgcggagacaaaagctgttgccagtgctgatgcacttcgtagtgccctgcttgatcttgactccatgcttgcgctcagctctgcaagtgcttctggcaaccttgttgagactgcgccatctgatgccagtgtcattgtccctccgtgcaacattgctgatcttggcagcagagctttcatgaaaacttatggtgtttctgcgcctctgtacaccggtgcaatggccaagggaattgcctctgcggacttggtgatcgcagctggaaggcaaggaatccttgcgtcatttggtgctggaggccttccaatgcaagttgtgcgtgagtccattgaaaagattcaagctgccctgcccaatggaccatatgctgtcaacctcatccattctccttttgacagcaaccttgagaagggaaatgttgatctcttcttggaaaagggtgtcacttttgttgaggcttcagccttcatgacgttgacaccgcaagttgtcagatacagagcggctgggttgacgaggaatgcagatgggtcagtcaacataaggaacagaatcattgggaaagtctccagaactgagctggctgaaatgttcatgcgtcctgcacctgagcatcttttgcagaagctcattgcttctggggagatcaatcaagaacaagctgagttggccagacgtgttcctgtggctgatgacattgcggttgaagctgattctggtggacacactgacaaccgtccaatccatgtcattctgcctctgattatcaacctgagggataggcttcacagagagtgtggatacccagcaaacctgagggttcgtgttggtgctgggggtggcattgggtgtccccaagctgcgctggcaactttcaacatgggtgcctctttcattgtcactggaacagtgaaccaagttgccaaacaatctgggacgtgtgacaatgtgaggaaacagcttgcgaaagcaacttactcagatgtttgcatggcaccggcagctgacatgtttgaggaaggtgtgaaacttcaagttttgaagaaaggaacaatgttcccttcaagagccaacaaactctatgagttgttctgcaagtatgattcttttgagtccatgcctccagcagagcttgcgagggttgagaaaagaatcttcagtcgtgcattggaagaggtctgggatgagaccaagaacttctacatcaaccgtctccacaacccagagaagatacagagggctgagagggaccccaaactgaagatgtcactgtgtttcagatggtatctgtccctggcttcaaggtgggccaacactggagcttctgacagagtcatggactaccaagtttggtgtggtcctgccattggttcattcaatgatttcatcaaaggaacttaccttgatccggcagtggcaaatgagtacccgtgtgttgtgcagatcaacaaacagattcttagaggagcgtgcttcttgaggcgtcttgaaatactgagaaatgcaaggctttcagatggtgcagctgcacttgtggcgagcattgatgacacatatgtccctgctgagaagctgtgagtagttagcttaatcacttaggtcacctcgagtatcaaaatctatttagaaatacacaatattttgttgcaggcttgctggagaatcgatctgctatcataaaaattacaaaaaaattttatttgcctcaattattttaggattggtattaaggacgcttaaattatttgtcgggtcactacgcatcattgtgattgagaagatcagcgatacgaaatattcgtagtactatcgataatttatttgaaaattcataagaaaagcaaacgttacatgaattgatgaaacaatacaaagacagataaagccacgcacatttaggatattggccgagattactgaatattgagtaagatcacggaatttctgacaggagcatgtcttcaattcagcccaaatggcagttgaaatactcaaaccgccccatatgcaggagcggatcattcattgtttgtttggttgcctttgccaacatgggagtccaaggttggcgcgccgaattcgcggccgcttaattaatctgacctgaccactagacctgagtgagtacagatgtgctactagtgctagcctcgaggtcgaccaacttttctatacaaagttgtctagacctaggactaggcactgagtgactcactgacctgactgagtgactggcggccgcagcttatagtaaagatttttttgttaataaaatgaaagttaatatttatggatttatttgaacatatttacaagtttttgttaataaatttatttacagaagtgttaaatttgaaaatgtgttaaatgagagttaatatttatggatataatattactttatttaaaaataaaatgaatttatattaaaatatgatttggtaaaagatattataaagaggaacttggatgagaaagacgacgatgggcaaaagttgcatggcacaccgcttttgttcagtaacatctgcactgtggcgcctttttcacactcaccatgcatgctgccacgtcagctttcacactatgacaccactggccatacacgttgccacctcagctttctcctcttctcactatgacacgactggccatgcatgcatgcatgctgccacctcagctcccgcctcttcacccgtgtctttctctcatgtcgcagtgctgcgtgccaacctcttctctctataaatagagagaagagaatgatggttaaactcaaaccaaaacaagaaaacatacacaaatagcaaaacggatccacaaccaaaaatggcgcttcgtgtcaagaccaacaagaagccatgttgggagatgaccaaggaggaactgacctctggcaaaactgaggtgttcaactatgaggaactcctggagtttgcagagggtgacatagctaaggtttttggtccggagtttgctgtcatagacaagtaccccagaagggtgaggctgcctgctcgtgaatacctgcttgtgacaagggtcacactcatggatgccgaggtcaacaactacagagttggtgccagaatggtcactgagtatgatcttccagtgaatggcgaattgtctgagggaggtgattgtccctgggcagttctggttgagagtggacagtgcgatttgatgctgatatcatacatgggaattgatttccagaaccaaggtgacagagtttaccgtctgctcaacaccacgttgacattctatggggttgcccatgagggagagacccttgagtatgacatcagagtgaccggttttgccaaacgtttggatggtggcatctccatgttcttctttgagtatgactgctatgtcaatgggaggcttctcattgagatgagagatggctgtgctggcttcttcacaaatgaggagcttgatgcgggaaagggtgtggtgttcacaagaggggatttggctgccagagctaagattccaaagcaagatgtttctccctatgctgtcgctccctgccttcacaaaacaaaactcaacgaaaaggagatgcagaccttggttgacaaagattgggcttccgtttttggctcaaagaatggcatgccggagatcaactacaaactctgcgcacgtaagatgctcatgattgatagagtcaccagcattgaccataagggaggtgtgtacggtttgggtcagttggttggtgagaaaatcttggagagggaccattggtacttcccatgccattttgttaaggatcaagtcatggctggatctcttgtcagcgacggttgttcacaaatgctcaagatgtacatgatctggctcggtttgcaccttaccaccggaccatttgacttcagacccgtcaacggacacccgaacaaagttaggtgtaggggtcagatatctcctcataagggaaagttggtctacgtcatggagatcaaagagatgggattcgacgaggataacgatccgtacgccattgctgacgtcaacatcattgacgttgatttcgaaaagggtcaagatttcagccttgatagaatcagcgactacggaaagggggatcttaacaaaaagatcgtcgtggacttcaagggcattgctctcaagatgcagaagagatccacgaacaagaacccctccaaagttcagcccgtttttgctaacggtgcagccactgtgggaccggaagcgtccaaggccagctctggtgccagtgctagtgcttctgctgcccctgcgaagcctgctttctcagcagatgttcttgcgccaaagccagttgcacttcctgaacatatcctcaagggtgacgctctcgctccgaaagaaatgtcctggcatcccatgtcaaaacttcctggcaacccgacgccgttcttctcccctagttcttaccctccgagggcaatttgcttcatccctttccctggcaacccacttgacaacaattgcaaagctggagaaatgcctctgaactggtacaacatgtcagagttcatgtgtggaaaagttagcaactgcttgggaccagagttcgcaagatttgataagtcaaatacgagcagaagccctgcttttgatttggctcttgtgactagagttgttgaagtcacaaacatggaacatggcaagttcctgaatgttgattgcaatcccagcaaaggcacaatggtgggggagtttgactgtcctcaagatgcgtggttctttgatggttcttgcaatgatgggcacatgccttattccatcatcatggaaatcggacttcagacatccggtgttctcaccagtgtgttgaaagcaccactgacgatggacaaagatgacattctctttaggaaccttgatgcaagtgctgaaatggtgaggccagatgtggatgtgagggggaaaaccataaggaatgtgaccaagtgcactggatatgcaatgttgggaaagatggggattcacagattcacgtttgagttgtctgttgatggcgtggttttctacaaaggaagcacttcctttggatggttcactccagaggtgtttgctcagcaagctggacttgacaatgggaaaaagacggagccttggtgcaaaactaacaacacgagtgtgagaagagttgaaatcgcatcagccaaaggcaaagaacagctgactgagaaacttccagatgcaactaatgctcaagttctcagaaggtcagaacagtgtgagtatttggattacctcaacattgctcctgattctgggctgcatgggaaaggatatgcgcatggacacaaagatgttaacccacaagactggttcttctcttgtcacttttggtttgatcctgtgatgcctggatctttgggaattgagtcaatgttccagctcattgaggcatttgcggtggaccagaacataccgggagaatacaatgtgagcaatccgacctttgcccatgcccctggaaaaacggcgtggaagtaccgtggtcaattgacaccaaagaaccgtgcgatggactgtgaggtgcacatagtttcaatcacagcctctcctgaaaatggaggctacgttgacatagtggcagatggagcactttgggttgatggtctccgtgtgtatgaagccaaagaactcagagttcgtgttgtcagtgcaaaacctcaagccattccggatgttcaacaacagccacccagcgcaaaagcggaccctgggaaaactggagttgcactcagtccgactcagttgagagatgtcctgcttgaagtggacaatccattgtatcttggtgttgaaaactccaatttggtgcagtttgaatccaaacctgcaacttcttcaaggattgtcagtatcaaaccatgctccataagtgatcttggtgacaagtccttcatggaaacgtacaatgtgtcagcacctctgtacactggagcaatggccaagggaattgcgtctgcggaccttgtcattgctgctgggaagaggaagatattgggttcttttggagcgggtgggcttccaatgcaccatgtgagggcagctttggagaagatacaagcggctctgcctcaaggaccatatgctgtgaacctcattcattcaccttttgacagcaacttggaaaaggggaatgttgatctcttcctcgaaaagggcgttactgtggtggaggcttctgcattcatgaccctcactccccaagttgttcgttaccgtgcagccggactctcaaggaacgctgatgggagtgtcaacatcagaaaccgtatcattggaaaagtgtccagaacagaactcgccgaaatgttcatcagaccggctccggaacacctccttgagaaactcatagcttctggtgagataacacaagaacaagccgaacttgcccgtcgtgttcctgtcgcagacgacatcgctgttgaagctgattctggtggtcacactgacaaccgtcccatccacgtcatcttgcctttgatcatcaaccttaggaacagactgcacagagagtgtggttatcctgcgcaccttagagtcagagttggagctggaggcggtgttggctgcccacaagctgctgcggctgccctcacaatgggagctgccttcatagtgactgggactgtcaatcaagttgctaaacagtccgggacatgtgacaacgtgagaaaacaactcagtcaagccacctacagtgacatttgcatggctccagcagctgatatgtttgaggaaggtgtgaaactccaagttctcaagaagggaacaatgttcccatcaagagctaacaaattgtacgaactcttttgcaagtacgactctttcgattcaatgcctcctgctgaacttgaaaggatcgagaagaggatcttcaagagggcacttcaagaggtctgggaagagaccaaggacttttacatcaatggtttgaagaatccagagaagatacagagagcggaacatgaccccaaactcaagatgtctttgtgtttcagatggtatcttggtcttgcatcacgttgggccaacatgggtgctcctgatcgtgtcatggactatcaagtctggtgtggtccagccattggagccttcaatgacttcatcaaaggaacatatcttgatcctgctgtctctaatgagtacccatgtgttgtccagatcaaccttcagattttgcgtggtgcatgttacctgaggcgtcttaatgctctgagaaatgatccgaggattgatcttgagactgaagatgctgcctttgtctatgagccaacgaatgcgctttgagtagttagcttaatcacttaggtcacccagtccaagcccggcctagcacgatgatcatgagtgttgctattgatgtatgttaatactatacacagtcatcgtgtgtgttttataaaactgtaagcttaggatgtttgaggctaatgtaattagcactacaccgtaataaatgagaggtttactttatgttttaataatgttcttacccttgctgctctctaaactgtaatggcgtacggttagctaaactaaagtaaaaatcgattcgcttgagtaaaattagtgaccgggaaagatcatcgactactactgctcagagatgtaatcggtaattaagacttcaagctcaataattaattaggagtaaatctggcttcgaatttttaaattgtcaacttccaaagaaggattggcaagactcaatctcaattgcccaacaaacatatggctctttacaaatttggaatctctttttgatggcaagaacgtcgtaattcctctgtcgatctcatgtaattaccaaactcatctacttattactttctttatatgcacttactgatgcggccgcttaattaatcacgagtggatgactgtcacgactgactcatgactgactactagtgctagcctcgaggtcgacacaactttgtataataaagttgtctagtctgcttttacatgcgagacacatcttctaaagtaattttaataatagttactatattcaagatttcatatatcaaatactcaatattacttctaaaaaattaattagatataattaaaatattacttttttaattttaagtttaattgttgaatttgtgactattgatttattattctactatgtttaaattgttttatagatagtttaaagtaaatataagtaatgtagtagagtgttagagtgttaccctaaaccataaactataagatttatggtggactaattttcatatatttcttattgcttttaccttttcttggtatgtaagtccgtaactggaattactgtgggttgccatgacactctgtggtcttttggttcatgcatggatcttgcgcaagaaaaagacaaagaacaaagaaaaaagacaaaacagagagacaaaacgcaatcacacaaccaactcaaattagtcactggctgatcaagatcgccgcgtccatgtatgtctaaatgccatgcaaagcaacacgtgcttaacatgcactttaaatggctcacccatctcaacccacacacaaacacattgcctttttcttcatcatcaccacaaccacctgtatatattcattctcttccgccacctcaatttcttcacttcaacacacgtcaacctgcatatgcgtgtcatcccatgcccaaatctccatgcatgttccaaccaccttctctcttatataatacctataaatacctctaatatcactcacttctttcatcatccatccatccagagtactactactctactactataataccccaacccaactcatattcaatactactctaggatccacaaccaaaaatgcttcagcacacttggcttccgaagcctcccaatctgaccctcttgtcagatgaggttcatctctggaggattcctcttgaccagcctgagtcacaacttcaagaccttgctgccaccctgagcagtgatgaattggcgagggcaaacagattctactttccagaacacagaaggcgtttcactgctgggagaggcatcctcagatccatcttgggtggatacttgggagtggaaccgggtcaagtcaagtttgattatgagtcccgtgggaaaccgatccttggtgacagatttgctgagagtggactcctgttcaacttgtctcacagccagaaccttgccttgtgtgctgtcaactacacgcgtcaaataggcattgatcttgaatatctgcgtccaacatctgacttggagtctcttgcaaagaggttctttctcccaagagaatatgaactcttgaggtcactccctgatgagcagaaacagaagattttctttcgttactggacttgcaaagaggcttatctcaaagcaacgggagatggaatagccaaacttgaagagatcgagatagcactcaccccaacagaacctgccaagctccaaacagctcctgcgtggtctctgttggagcttgtgccagatgacaattgtgttgcagctgtggctgttgcgggttttggttggcagcccaagttctggcattactgagtagttagcttaatcacttaggtcacctcgagtatcaaaatctatttagaaatacacaatattttgttgcaggcttgctggagaatcgatctgctatcataaaaattacaaaaaaattttatttgcctcaattattttaggattggtattaaggacgcttaaattatttgtcgggtcactacgcatcattgtgattgagaagatcagcgatacgaaatattcgtagtactatcgataatttatttgaaaattcataagaaaagcaaacgttacatgaattgatgaaacaatacaaagacagataaagccacgcacatttaggatattggccgagattactgaatattgagtaagatcacggaatttctgacaggagcatgtcttcaattcagcccaaatggcagttgaaatactcaaaccgccccatatgcaggagcggatcattcattgtttgtttggttgcctttgccaacatgggagtccaaggttggcgcgccgaattcgcggccgcttaattaactactgtcactgaggccgtagacgagtacggactgatctaactagtgctagcctcgaggtcgacacccagctttcttgtacaaagtggttgcggccgcttaattaaatttaaattcaattaatgcaatcttgattttcaacaacgaaggtaatggcgtaaaagaaaaaatgtatgttattgtattgatctttcatgatgttgaagcgtgccataatatgatgatgtataattaaaatattaactgtcgcattttattgaaatggcactgttatttcaaccatatctttgattctgttacatgacacgactgcaagaagtaaataatagacgccgttgttaaagaattgctatcatatgtgcctaactagagggaatttgagcgtcagacctaatcaaatattacaaaatatctcactctgtcgccagcaatggtgtaatcagcgcagacaaatggcgtaaagatcgcggaaaaacctccccgagtggcatgatagctgcctctgtattgctgatttagtcagccttatttgacttaagggtgccctcgttagtgacaaattgctttcaaggagacagccatgccccacactttgttgaaaaacaaattgcctttggggagacggtaaagccagttgctcttcaataaggaatgtcgaggaggcaatgtaaccgcctctggtagtacacttctctaatccaaaaatcaatttgtattcaagataccgcaaaaaacttatggtttaaaccctgcaggactagtccagaaggtaattatccaagatgtagcatcaagaatccaatgtttacgggaaaaactatggaagtattatgtaagctcagcaagaagcagatcaatatgcggcacatatgcaacctatgttcaaaaatgaagaatgtacagatacaagatcctatactgccagaatacgaagaagaatacgtagaaattgaaaaagaagaaccaggcgaagaaaagaatcttgaagacgtaagcactgacgacaacaatgaaaagaagaagataaggtcggtgattgtgaaagagacatagaggacacatgtaaggtggaaaatgtaagggcggaaagtaaccttatcacaaaggaatcttatcccccactacttatccttttatatttttccgtgtcatttttgcccttgagttttcctatataaggaaccaagttcggcatttgtgaaaacaagaaaaaatttggtgtaagctattttctttgaagtactgaggatacaacttcagagaaatttgtaagtttgtaggtaccagatctggatcccaaaccatgtctccggagaggagaccagttgagattaggccagctacagcagctgatatggccgcggtttgtgatatcgttaaccattacattgagacgtctacagtgaactttaggacagagccacaaacaccacaagagtggattgatgatctagagaggttgcaagatagatacccttggttggttgctgaggttgagggtgttgtggctggtattgcttacgctgggccctggaaggctaggaacgcttacgattggacagttgagagtactgtttacgtgtcacataggcatcaaaggttgggcctaggatctacattgtacacacatttgcttaagtctatggaggcgcaaggttttaagtctgtggttgctgttataggccttccaaacgatccatctgttaggttgcatgaggctttgggatacacagcccggggtacattgcgcgcagctggatacaagcatggtggatggcatgatgttggtttttggcaaagggattttgagttgccagctcctccaaggccagttaggccagttacccaaatctgagtagttagcttaatcacctagagctcgatcggcggcaatagcttcttagcgccatcccgggttgatcctatctgtgttgaaatagttgcggtgggcaaggctctctttcagaaagacaggcggccaaaggaacccaaggtgaggtgggctatggctctcagttccttgtggaagcgcttggtctaaggtgcagaggtgttagcgggatgaagcaaaagtgtccgattgtaacaagatatgttgatcctacgtaaggatattaaagtatgtattcatcactaatataatcagtgtattccaatatgtactacgatttccaatgtctttattgtcgccgtatgtaatcggcgtcacaaaataatccccggtgactttcttttaatccaggatgaaataatatgttattataatttttgcgatttggtccgttataggaattgaagtgtgcttgaggtcggtcgccaccactcccatttcataattttacatgtatttgaaaaataaaaatttatggtattcaatttaaacacgtatacttgtaaagaatgatatcttgaaagaaatatagtttaaatatttattgataaaataacaagtcaggtattatagtccaagcaaaaacataaatttattgatgcaagtttaaattcagaaatatttcaataactgattatatcagctggtacattgccgtagatgaaagactgagtgcgatattatggtgtaatacataggaattcgtttaaacgatctgcgtctaattttcggtccaacttgcacaggaaagacgtcgaccgcggtagctcttgcccagcagactgggcttccagtcctttcgctcgatcgggtccaatgttgtcctcagctgtgaaccggaagcggacgaccaacagtggaagaactgaaaggaacgagccgtctataccttgatgatcggcctctggtgaagggtatcatcgcagccaagcaagctcatgaaaggctgatgggggaggtgtataattatgaggcccacggcgggcttattctttagggaggatctatctcgttgctcaagtgcatggcgcaaagcagttattggagtgcggattttcgttggcatattattcgccacgagttagcagacgaagagaccttcatgaacgtggccaaggccagagttaagcagatgttacgccctgctgcaggcctttctattatccaatagttggttgatctttggaaagagcctcggctgaggcccatactgaaagagatcgatggatatcgatatgccatgttgtttgctagccagaaccagatcacatccgatatgctattgcagcttgacgcagatatggaggataagttgattcatgggatcgctcaggagtagctcatccatgcacgccgacaagaacagaaattccgtcgagttaacgcagccgcttacgacggattcgaaggtcatccattcggaatgtattagtttgcaccagctccgcgtcacacctgtcttcatttgaataagatgttagcaattgtttttagctttgtcttgttgtggcagggcggcaagtgcttcagacatcattctgttttcaaattttatgctggagaacagcttcttaattcctttggaaataatagactgcgtcttaaaattcagatgtctggatatagatatgattgtaaaataacctatttaagtgtcatttagaacataagttttatgaatgttcttccattttcgtcatcgaacgaataagagtaaatacaccttttttaacattacaaataagttcttatacgttgtttatacaccgggaatcatttccattattttcgcgcaaaagtcacggatattcgtgaaagcgacataaactgcgaaatttgcggggagtgtcttgagtttgcctcgaggctagcgcatgcacatagacacacacatcatctcattgatgcttggtaataattgtcattagattgtttttatgcatagatgcactcgaaatcagccaattttagacaagtatcaaacggatgtgacttcagtacattaaaaacgtccgcaatgtgttattaagttgtctaagcgtcaatttgatttacaattgaatatatcctgccccagccagccaacagctcgatttacaattgaatatatcctgccggccggcccacgcgtgtcgaggaattctgatctggcccccatttggacgtgaatgtagacacgtcgaaataaagatttccgaattagaataatttgtttattgctttcgcctataaatacgacggatcgtaatttgtcgttttatcaaaatgtactttcattttataataacgctgcggacatctacatttttgaattgaaaaaaaattggtaattactctttctttttctccatattgaccatcatactcattgctgatccatgtagatttcccggacatgaagccatttacaattgaatatatcctgccgccgctgccgctttgcacccggtggagcttgcatgttggtttctacgcagaactgagccggttaggcagataatttccattgagaactgagccatgtgcaccttccccccaacacggtgagcgacggggcaacggagtgatccacatgggacttttaaacatcatccgtcggatggcgttgcgagagaagcagtcgatccgtgagatcagccgacgcaccgggcaggcgcgcaacacgatcgcaaagtatttgaacgcaggtacaatcgagccgacgttcacgcggaacgaccaagcaagcttggctgccatttttggggtgaggccgttcgcggccgaggggcgcagcccctggggggatgggaggcccgcgttagcgggccgggagggttcgagaagggggggcaccccccttcggcgtgcgcggtcacgcgcacagggcgcagccctggttaaaaacaaggtttataaatattggtttaaaagcaggttaaaagacaggttagcggtggccgaaaaacgggcggaaacccttgcaaatgctggattttctgcctgtggacagcccctcaaatgtcaataggtgcgcccctcatctgtcagcactctgcccctcaagtgtcaaggatcgcgcccctcatctgtcagtagtcgcgcccctcaagtgtcaataccgcagggcacttatccccaggcttgtccacatcatctgtgggaaactcgcgtaaaatcaggcgttttcgccgatttgcgaggctggccagctccacgtcgccggccgaaatcgagcctgcccctcatctgtcaacgccgcgccgggtgagtcggcccctcaagtgtcaacgtccgcccctcatctgtcagtgagggccaagttttccgcgaggtatccacaacgccggcggccgcggtgtctcgcacacggcttcgacggcgtttctggcgcgtttgcagggccatagacggccgccagcccagcggcgagggcaaccagcccggtgagcgtcggaaagggtcgacggatcttttccgctgcataaccctgcttcggggtcattatagcgattttttcggtatatccatcctttttcgcacgatatacaggattttgccaaagggttcgtgtagactttccttggtgtatccaacggcgtcagccgggcaggataggtgaagtaggcccacccgcgagcgggtgttccttcttcactgtcccttattcgcacctggcggtgctcaacgggaatcctgctctgcgaggctggccggctaccgccggcgtaacagatgagggcaagcggatggctgatgaaaccaagccaaccaggaagggcagcccacctatcaaggtgtactgccttccagacgaacgaagagcgattgaggaaaaggcggcggcggccggcatgagcctgtcggcctacctgctggccgtcggccagggctacaaaatcacgggcgtcgtggactatgagcacgtccgcgagctggcccgcatcaatggcgacctgggccgcctgggcggcctgctgaaactctggctcaccgacgacccgcgcacggcgcggttcggtgatgccacgatcctcgccctgctggcgaagatcgaagagaagcaggacgagcttggcaaggtcatgatgggcgtggtccgcccgagggcagagccatgacttttttagccgctaaaacggccggggggtgcgcgtgattgccaagcacgtccccatgcgctccatcaagaagagcgacttcgcggagctggtattcgtgcagggcaagattcggaataccaagtacgagaaggacggccagacggtctacgggaccgacttcattgccgataaggtggattatctggacaccaaggcaccaggcgggtcaaatcaggaataagggcacattgccccggcgtgagtcggggcaatcccgcaaggagggtgaatgaatcggacgtttgaccggaaggcatacaggcaagaactgatcgacgcggggttttccgccgaggatgccgaaaccatcgcaagccgcaccgtcatgcgtgcgccccgcgaaaccttccagtccgtcggctcgatggtccagcaagctacggccaagatcgagcgcgacagcgtgcaactggctccccctgccctgcccgcgccatcggccgccgtggagcgttcgcgtcgtctcgaacaggaggcggcaggtttggcgaagtcgatgaccatcgacacgcgaggaactatgacgaccaagaagcgaaaaaccgccggcgaggacctggcaaaacaggtcagcgaggccaagcaggccgcgttgctgaaacacacgaagcagcagatcaaggaaatgcagctttccttgttcgatattgcgccgtggccggacacgatgcgagcgatgccaaacgacacggcccgctctgccctgttcaccacgcgcaacaagaaaatcccgcgcgaggcgctgcaaaacaaggtcattttccacgtcaacaaggacgtgaagatcacctacaccggcgtcgagctgcgggccgacgatgacgaactggtgtggcagcaggtgttggagtacgcgaagcgcacccctatcggcgagccgatcaccttcacgttctacgagctttgccaggacctgggctggtcgatcaatggccggtattacacgaaggccgaggaatgcctgtcgcgcctacaggcgacggcgatgggcttcacgtccgaccgcgttgggcacctggaatcggtgtcgctgctgcaccgcttccgcgtcctggaccgtggcaagaaaacgtcccgttgccaggtcctgatcgacgaggaaatcgtcgtgctgtttgctggcgaccactacacgaaattcatatgggagaagtaccgcaagctgtcgccgacggcccgacggatgttcgactatttcagctcgcaccgggagccgtacccgctcaagctggaaaccttccgcctcatgtgcggatcggattccacccgcgtgaagaagtggcgcgagcaggtcggcgaagcctgcgaagagttgcgaggcagcggcctggtggaacacgcctgggtcaatgatgacctggtgcattgcaaacgctagggccttgtggggtcagttccggctgggggttcagcagccagcgctttactggcatttcaggaacaagcgggcactgctcgacgcacttgcttcgctcagtatcgctcgggacgcacggcgcgctctacgaactgccgataaacagaggattaaaattgacaattgtgattaaggctcagattcgacggcttggagcggccgacgtgcaggatttccgcgagatccgattgtcggccctgaagaaagctccagagatgttcgggtccgtttacgagcacgaggagaaaaagcccatggaggcgttcgctgaacggttgcgagatgccgtggcattcggcgcctacatcgacggcgagatcattgggctgtcggtcttcaaacaggaggacggccccaaggacgctcacaaggcgcatctgtccggcgttttcgtggagcccgaacagcgaggccgaggggtcgccggtatgctgctgcgggcgttgccggcgggtttattgctcgtgatgatcgtccgacagattccaacgggaatctggtggatgcgcatcttcatcctcggcgcacttaatatttcgctattctggagcttgttgtttatttcggtctaccgcctgccgggcggggtcgcggcgacggtaggcgctgtgcagccgctgatggtcgtgttcatctctgccgctctgctaggtagcccgatacgattgatggcggtcctgggggctatttgcggaactgcgggcgtggcgctgttggtgttgacaccaaacgcagcgctagatcctgtcggcgtcgcagcgggcctggcgggggcggtttccatggcgttcggaaccgtgctgacccgcaagtggcaacctcccgtgcctctgctcacctttaccgcctggcaactggcggccggaggacttctgctcgttccagtagctttagtgtttgatccgccaatcccgatgcctacaggaaccaatgttctcggcctggcgtggctcggcctgatcggagcgggtttaacctacttcctttggttccgggggatctcgcgactcgaacctacagttgtttccttactgggctttctcagcccccgagcgcttagtgggaatttgtaccccttatcgaaccgggagcacaggatgacgcctaacaattcattcaagccgacaccgcttcgcggcgcggcttaattcaggagttaaacatcatgagggaagcggtgatcgccgaagtatcgactcaactatcagaggtagttggcgtcatcgagcgccatctcgaaccgacgttgctggccgtacatttgtacggctccgcagtggatggcggcctgaagccacacagtgatattgatttgctggttacggtgaccgtaaggcttgatgaaacaacgcggcgagctttgatcaacgaccttttggaaacttcggcttcccctggagagagcgagattctccgcgctgtagaagtcaccattgttgtgcacgacgacatcattccgtggcgttatccagctaagcgcgaactgcaatttggagaatggcagcgcaatgacattcttgcaggtatcttcgagccagccacgatcgacattgatctggctatcttgctgacaaaagcaagagaacatagcgttgccttggtaggtccagcggcggaggaactctttgatccggttcctgaacaggatctatttgaggcgctaaatgaaaccttaacgctatggaactcgccgcccgactgggctggcgatgagcgaaatgtagtgcttacgttgtcccgcatttggtacagcgcagtaaccggcaaaatcgcgccgaaggatgtcgctgccgactgggcaatggagcgcctgccggcccagtatcagcccgtcatacttgaagctaggcaggcttatcttggacaagaagatcgcttggcctcgcgcgcagatcagttggaagaatttgttcactacgtgaaaggcgagatcaccaaggtagtcggcaaataatgtctaacaattcgttcaagccgacgccgcttcgcggcgcggcttaactcaagcgttagagagctggggaagactatgcgcgatctgttgaaggtggttctaagcctcgtcttgcgatggcatttcgatccattcccattccgcgctcaagatggcttcccctcggcagttcatcagggctaaatcaatctagccgacttgtccggtgaaatgggctgcactccaacagaaacaatcaaacaaacatacacagcgacttattcacacgagctca

SEQ ID NO: 60 - DNA, 37935 bp, Artificial sequence
  plasmid pDAB109507
gtacaaaaaagcaggcttctagacctaggtggagtcatcacgcagactatctcagcatgtgcgtagcacgcggccgcctcccagtatcattatagtgaaagttttggctctctcgccggtggttttttacctctatttaaaggggttttccacctaaaaattctggtatcattctcactttacttgttactttaatttctcataatctttggttgaaattatcacgcttccgcacacgatatccctacaaatttattatttgttaaacattttcaaaccgcataaaattttatgaagtcccgtctatctttaatgtagtctaacattttcatattgaaatatataatttacttaattttagcgttggtagaaagcataatgatttattcttattcttcttcatataaatgtttaatatacaatataaacaaattctttaccttaagaaggatttcccattttatattttaaaaatatatttatcaaatatttttcaaccacgtaaatctcataataataagttgtttcaaaagtaataaaatttaactccataatttttttattcgactgatcttaaagcaacacccagtgacacaactagccatttttttctttgaataaaaaaatccaattatcattgtattttttttatacaatgaaaatttcaccaaacaatgatttgtggtatttctgaagcaagtcatgttatgcaaaattctataattcccatttgacactacggaagtaactgaagatctgcttttacatgcgagacacatcttctaaagtaattttaataatagttactatattcaagatttcatatatcaaatactcaatattacttctaaaaaattaattagatataattaaaatattacttttttaattttaagtttaattgttgaatttgtgactattgatttattattctactatgtttaaattgttttatagatagtttaaagtaaatataagtaatgtagtagagtgttagagtgttaccctaaaccataaactataagatttatggtggactaattttcatatatttcttattgcttttaccttttcttggtatgtaagtccgtaactggaattactgtgggttgccatgacactctgtggtcttttggttcatgcatggatcttgcgcaagaaaaagacaaagaacaaagaaaaaagacaaaacagagagacaaaacgcaatcacacaaccaactcaaattagtcactggctgatcaagatcgccgcgtccatgtatgtctaaatgccatgcaaagcaacacgtgcttaacatgcactttaaatggctcacccatctcaacccacacacaaacacattgcctttttcttcatcatcaccacaaccacctgtatatattcattctcttccgccacctcaatttcttcacttcaacacacgtcaacctgcatatgcgtgtcatcccatgcccaaatctccatgcatgttccaaccaccttctctcttatataatacctataaatacctctaatatcactcacttctttcatcatccatccatccagagtactactactctactactataataccccaacccaactcatattcaatactactctaggatccacaaccaaaaatggcagcgaggctgcaagagcagaaaggaggtgagatggacacgaggattgcgatcataggcatgagcgccatacttccttgtggaaccacggtgagagagtcatgggagaccataagggctggcattgattgcctgtctgatcttcctgaggatcgtgttgatgtgactgcgtactttgacccagtcaagaccacaaaggacaaaatctactgcaagagaggaggtttcattcctgagtatgactttgatgcgcgtgagtttggtctcaacatgttccagatggaagattctgatgcgaatcagaccatctcacttctcaaggtcaaagaagcacttcaagatgctgggattgatgcacttggaaaggagaagaaaaacataggatgcgtgcttggcattggaggtggacagaagagttcacatgagttctacagcagactcaactatgtggttgtggagaaagtcttgagaaagatggggatgccagaggaagatgtcaaagtggctgtggagaagtacaaagcgaacttcccagaatggagacttgactctttccctggattccttgggaatgtcactgctggcagatgcaccaacacattcaacttggatggcatgaactgcgttgtggatgctgcatgtgcaagctccttgatagcagtcaaggttgcgattgatgaactgctctatggtgactgcgacatgatggtcactggtgcaacctgcacagacaactccattgggatgtacatggctttctcaaagacacctgtgttcagcacggacccaagtgtgagagcgtatgatgagaaaacgaaagggatgctcattggtgagggatcagccatgttggtgctcaaacgttatgcagatgcagtgagggatggtgatgagattcatgctgtgattcgtggttgtgcaagctcaagtgatggcaaagcagctggcatctacactcccacaatcagtggtcaagaggaagccttgagacgtgcatacaatcgtgcctgcgttgaccctgccactgtcactttggttgagggtcatgggactggcactccagttggagataggattgagttgactgcgttgaggaacttgtttgacaaagcgtatggtgaagggaacacagagaaagttgcagttggaagtatcaagtccagtattggtcatttgaaggctgttgctggtcttgctggaatgatcaaggtcatcatggctctcaaacacaagactttgcctggaacgatcaatgtggacaatccacccaatctctatgacaacactcccatcaatgagtcatccctctacatcaacacgatgaacagaccctggttccctccacctggtgttccgagacgtgctggaatatccagctttggctttggaggtgccaactaccatgcagtgttggaagaggctgaaccagagcacacgacagcgtacagactcaacaaacgtccacaaccggtgttgatgatggctgcaactcctgctgcgttgcagagcctttgtgaagctcagctgaaagagtttgaagctgcgatcaaggagaatgagacagtcaagaatactgcctacatcaagtgtgtcaagtttggagaacagttcaagttccctgggagcatacctgcgaccaatgcgagactgggattcttggtcaaagatgcggaggatgcgtgctccacgcttcgtgctatatgtgctcagtttgccaaagatgtgaccaaagaagcgtggaggcttccgagagaaggagtttctttccgtgccaaaggcattgccaccaatggtgctgttgctgcactcttctctggacaaggtgctcagtacacacacatgttcagtgaagttgcgatgaactggcctcagttcagacagtccattgctgcaatggacgctgcacagtccaaggttgctggaagtgacaaagactttgaaagagtctctcaagtcctgtacccaaggaaaccgtacgaacgtgagccagaacaagatcacaagaaaatctcactcacagcatacagccagccgtcaaccctggcatgtgctcttggtgcctttgagattttcaaggaagctggattcactccagactttgcagctggacacagcttgggtgagtttgctgcgctctatgcagctggttgtgttgacagagatgagttgtttgaacttgtttgcagaagggcaaggatcatgggaggcaaagatgcacctgccacacccaaaggttgcatggcagctgtcataggacccaacgcagagaacatcaaggttcaagctgccaacgtctggcttggaaactcaaactctccgtctcagactgtcattactgggtctgttgaagggattcaagctgaaagtgccagattgcagaaggaagggttcagagttgtgcctcttgcttgtgagtctgccttccattctccacagatggaaaatgccagctcagctttcaaagatgtcatatccaaggtttccttccgtacacccaaagcagaaacaaagctcttcagcaatgtttctggagagacctatccgacggatgccagagagatgctcactcaacacatgacctcatctgtgaagttcctgacccaagtgaggaacatgcaccaagctggtgcgagaatctttgttgagtttggaccgaaacaagttctcagcaaacttgtttctgaaaccctcaaagatgacccgtctgttgtcacagtgtctgtgaacccagcttctggcacggactctgacatacagttgagggatgctgcagttcagctggttgtggctggtgtcaatcttcaagggtttgacaagtgggatgctcctgatgccacgaggatgcaagccatcaagaaaaagagaaccacactcagactttcagctgccacctatgtcagtgacaagaccaagaaagtgagggatgctgccatgaacgacggaagatgtgtcacatacctcaagggtgctgcaccactcatcaaggctcctgaacctgtggttgacgaagctgccaagagggaggctgaaaggcttcagaaggagcttcaagacgctcagaggcagcttgacgacgccaaacgtgcagctgcagaagccaactccaaacttgctgctgccaaggaggaagccaagactgctgcagcttcagccaagcctgcagttgacactgctgttgtggagaaacatcgtgccatcctcaagtccatgctggctgagctggatggttatggaagtgttgatgcttcttcccttcagcaacagcaacagcaacagactgctccggcgcctgttaaagccgctgcccctgccgctcccgttgcaagtgctcctgctcccgccgtgtccaacgagttgcttgagaaagctgagacagttgtgatggaggttctcgctgccaagactggatacgaaacagacatgattgaggcggacatggagcttgagactgagttgggaattgacagcatcaagagggttgaaattctttctgaagtccaagctatgcttaacgttgaggcgaaagatgttgatgctctctctaggacgagaacagtgggtgaagttgtcaacgctatgaaggcagaaatcgctggttcttccgctccggcgccggcagctgccgcacctgcaccggctaaagcggctccagctgcagctgcaccagctgtttctaatgagctgctcgaaaaggcagaaactgttgtgatggaagtccttgctgccaaaactggctacgaaactgacatgatagaatcagacatggagcttgagacggagcttggaattgattccatcaagcgtgtggaaatcctcagtgaagtccaagccatgctcaatgtggaagctaaggatgtggatgctctctcaaggaccagaactgtcggtgaggttgtcaatgccatgaaggctgagatagctggaggctccgctcctgcgccggccgctgccgctcctggtcccgctgccgcggctccagctccagctgcagccgctccggccgtctcaaacgaactccttgaaaaagctgagaccgtcgtgatggaggtcttggcagctaaaaccggctatgagactgacatgattgagtctgacatggaattggagacagaacttgggatagacagcatcaaacgtgttgaaatcctcagtgaggtccaagctatgctgaacgtggaagcgaaggatgttgatgctctgtccagaacgaggaccgttggtgaggttgtggatgccatgaaggctgaaattgctggagggtctgcgcccgcgccagctgcagccgctcctgcacccgcagccgcggcacctgctccagctgcacctgcacctgccgtttcttcagaactcttggagaaggctgagacggttgtgatggaggttttggctgcaaagactggctatgagaccgacatgattgaatctgatatggaattggagacagagcttgggatcgattccatcaaaagagtggagatcctgagtgaagtccaagccatgctcaatgttgaagctaaggatgttgatgcactttcaagaacaaggacagtgggtgaggttgtggatgccatgaaggcggagattgctggagggagcgcgcctgcgccagctgccgcggcacctgcaccggcagccgcagctccagctccagctgcaccagcaccggccgcgcccgcgccagctgtttcatccgaactcctggaaaaggccgagacggttgtgatggaggtgctcgcagctaagactggttacgagaccgacatgattgaaagtgacatggagcttgaaaccgagttgggaatagatagcatcaaacgtgttgaaatcttgtctgaggtccaagctatgttgaacgtggaggcaaaagatgtcgatgcgctttcaagaaccagaacagtcggtgaggtcgtggacgccatgaaggctgaaattgccggaagctctgctagtgcgccagctgcagccgcacctgcacctgctgccgcggcacctgctccagctgcagccgctcctgccgtcagcaatgagttgctggagaaagccgaaacagttgtgatggaagtccttgctgcaaaaactggttacgaaacggacatgattgagtcagacatggaattggagaccgaacttggaatagattccatcaagagagtggagatcctctctgaggtgcaagccatgctcaacgttgaggctaaagatgttgatgcactcagtaggacaagaactgtgggggaagttgtcgatgcgatgaaggctgagattgctggaggctctgctcctgcgccggcagctgccgcacctgcacccgcagccgcggcaccagctgtcagcaacgaattgcttgagaaggctgaaacagttgtcatggaagtgctggctgcaaaaaccggctatgagactgacatgattgagtctgacatggaacttgagacggaattgggcattgacagcatcaagcgtgttgagatcctcagtgaagtccaagcaatgctcaatgtggaggctaaggatgtggatgccctctcaaggaccagaacagttggtgaggtcgttgatgcgatgaaggcggagatcgctggaagttccgcgcctgcgccagctgcagccgctcctgcacccgcagccgcggcaccggctccagctgcagccgcaccggccgtctcctcagaactcctggaaaaggctgagacagttgtgatggaagtccttgctgcgaaaactggctatgagaccgacatgattgaatctgacatggaactggagaccgagcttggaattgactccatcaaacgtgttgaaatcctctctgaggttcaagcgatgttgaatgtggaggccaaagatgttgatgctctttccagaacaaggacggtgggagaggtggttgatgccatgaaggctgagatagctgggggttctgctcctgcgccagctgcagccgctcctgctcccgctgccgcggcaccagctgtcagcaacgaactccttgaaaaagctgaaactgttgtgatggaggttttggctgcaaagactggatacgagactgacatgatagagtcagacatggagttggaaacagagcttgggattgatagcatcaagcgtgtggaaatcctttctgaggttcaagccatgctgaacgttgaggccaaagatgtcgatgctttgtcaaggaccagaacggttggagaagtggtcgatgccatgaaggctgagatagctggtggatcagcccctgctccggctgcagccgctcctgcaagtgccggtgctgcaccagctgtgaagattgattcagttcatggtgctgactgtgacgatttgtcactgatgcacgcaaaggtggttgacatcagaaggccagatgaactgattctggaaagaccggagaaccgtccagttcttgtcgttgacgatggctcagagttgacacttgctcttgtgagggtgttgggagcctgtgcagttgtcttgacctttgagggattgcagttggctcagagagctggtgcagctgccattcgtcatgttctggctaaggacctttcagcagaatcagctgagaaggccatcaaagaggctgagcaaagatttggagcgttgggaggcttcataagccagcaagcagaaaggtttgaaccagctgagatactgggtttcacactcatgtgtgcgaagtttgccaaagcctctctctgcactgctgtggctggaggtcgtcctgccttcatcggtgtggctaggcttgacggcagacttggattcacctctcaaggcacttctgacgcactcaagagagcacagcgtggagcgatctttggactctgcaagacaatagggttggagtggtcagaatctgatgtgttcagccgtggtgtggacattgctcaagggatgcacccagaagatgctgcagttgccatagttagggagatggcgtgtgctgacatcagaatcagagaggttgggattggagcaaaccagcaaagatgcacaatcagagctgccaagttggagactgggaaccctcagagacagatagcgaaagacgatgtgcttctggtttctggaggtgctcgtgggatcacacctctttgcatccgtgagatcacgcgtcagattgctggaggcaagtacattctgttgggtcgtagcaaagtttctgcgtctgaaccagcatggtgtgctggcatcactgatgagaaggctgtgcagaaagctgccacccaagagttgaagagggccttcagtgctggtgaaggacccaaacccactccaagggctgtcacgaaacttgtgggatctgttcttggtgctcgtgaagtgagaagctccattgctgccattgaagctctgggtggcaaagcgatctacagctcttgtgatgtgaactctgctgcagatgttgccaaagcagttagggatgcagagtcccagcttggtgccagagttagtggaatcgttcacgcttctggtgtgctccgtgatcgtctcatagagaagaaactccctgacgagtttgatgctgtctttgggaccaaagtcactgggttggagaatcttctggctgcagttgatcgtgccaacctcaaacacatggttctcttcagctcccttgctggtttccacggcaatgttggtcagtctgactatgcgatggcaaacgaagctctcaacaagatgggtttggaacttgcgaaggatgtcagtgtcaagtccatctgctttggtccctgggatggtgggatggtgacacctcaactcaagaaacagtttcaagaaatgggagttcagatcattcctcgtgaaggaggtgctgatacagttgcgaggattgtgttgggatcaagtcctgctgagatccttgttggaaactggaggacaccatccaagaaagttggaagtgacacgatcaccctgcatagaaagatcagtgccaagtccaatcccttcttggaggatcatgtcatacaaggcagaagggtgttgccaatgacccttgctattgggagccttgctgagacctgccttggactcttccctggctactctctctgggccatagatgacgcacagctcttcaaaggtgtcactgttgatggagacgtcaactgtgaagtgaccctcacaccgtccactgctccgagtgggagggtgaatgtccaagcgacgctcaagacgttctcaagtggaaaacttgttccagcctacagagctgtcatagtgttgtccaaccaaggtgctccacctgccaatgcaaccatgcagcctccgagccttgatgcagatcctgctttgcaagggtcagtctatgatggcaagactctctttcatggtcctgcgttcagaggcattgatgacgttctcagctgcaccaagagccagcttgttgccaagtgttctgctgttcctggatcagatgcagccagaggagagtttgcaactgacactgatgcacatgatccctttgtcaatgatcttgcctttcaagcaatgttggtctgggtgaggagaacgctgggacaagctgcactcccgaactccattcagaggatagtccaacacagaccggtcccacaagacaaacccttctacatcaccctcagatccaatcagagtggtggacatagccagcacaaacatgcacttcagttccacaacgaacaaggtgatctcttcattgatgttcaagcctctgtcattgcgacagactcacttgcgttctgagtagttagcttaatcacttaggtcaccagtatgaactaaaatgcatgtaggtgtaagagctcatggagagcatggaatattgtatccgaccatgtaacagtataataactgagctccatctcacttcttctatgaataaacaaaggatgttatgatatattaacactctatctatgcaccttattgttctatgataaatttcctcttattattataaatcatctgaatcgtgacggcttatggaatgcttcaaatagtacaaaaacaaatgtgtactataagactttctaaacaattctaactttagcattgtgaacgagacataagtgttaagaagacataacaattataatggaagaagtttgtctccatttatatattatatattacccacttatgtattatattaggatgttaaggagacataacaattataaagagagaagtttgtatccatttatatattatatactacccatttatatattatacttatccacttatttaatgtctttataaggtttgatccatgatatttctaatattttagttgatatgtatatgaaaaggtactatttgaactctcttactctgtataaaggttggatcatccttaaagtgggtctatttaattttattgcttcttacagataaaaaaaaaattatgagttggtttgataaaatattgaaggatttaaaataataataaataataaataacatataatatatgtatataaatttattataatataacatttatctataaaaaagtaaatattgtcataaatctatacaatcgtttagccttgctggaacgaatctcaattatttaaacgagagtaaacatatttgactttttggttatttaacaaattattatttaacactatatgaaattttttttttttatcagcaaagaataaaattaaattaagaaggacaatggtgtcccaatccttatacaaccaacttccacaagaaagtcaagtcagagacaacaaaaaaacaagcaaaggaaattttttaatttgagttgtcttgtttgctgcataatttatgcagtaaaacactacacataacccttttagcagtagagcaatggttgaccgtgtgcttagcttcttttattttatttttttatcagcaaagaataaataaaataaaatgagacacttcagggatgtttcaacccttatacaaaaccccaaaaacaagtttcctagcaccctaccaacgaattcgcggccgcttaattaagatgagtgatactcaggactcaggactcactctgctgatcactagtgctagcctcgaggtcgacacaactttgtatacaaaagttgtctagacctaggttaattaagcggccgcagcttatttctcttttcgatactctaattgagccgtgcgctctatctagaccaattagaattgatggagctctaaaggttgctggctgttttcttgttcatatgattaacttctaaacttgtgtataaatattctctgaaagtgcttcttttggcatatgtaggttgggcaaaaacgaggaagattgcttctcaatttggaagatgatgaacagccgaagaagaaaataagaataggcagtcctgctactcaatggatctcagtctataacggtcgtcgtcccatgaaacagaggtaacacattttttgcatatacactttgatagttcctcactaactgtgtaatcttttggtagatatcactacaatgttggagagacaaggctgcgccagcatatacagaagggaaatgaagatggccttttgattagctgtgtagcatcagcagctaatctctgggctctcatcatggatgctggaactggattcacttctcaagtttatgagttgtcaccggtcttcctacacaaggtaataatcagttgaagcaattaagaatcaatctgatttgtagtaaactaagaagaacttaccttatgatttccccgcaggactggattatggaacaatgggaaaagaactactatataagctccatagcgggttcagataacgggagctctttagttgttatgtcaaaaggttagtgtttagtgaataataaacttattatcaaaaagtcttcattgacttatttatatacttgttgtgaattggtaggaactacttattctcagcagtcatacaaagtgagtgactcatttccattcaagtggataaataagaaatggaaagaagattttcatgtaacctccatgacaactgctggtaatcgttggggtgtggtaatgtcgaggaactctggcttctctgatcaggtaggtttttgtctcttattgtctggtgtttttattttcccctgatagtctaatatgataaactctgcgttgtgaaaggtggtggagcttgactttttgtacccaagcgatgggatacataggaggtgggagaatgggtatagaataacatcaatggcagcaactgcggatcaagcagctttcatattaagcataccaaagcgtaagatggtggatgaaactcaagagactctccgcaccaccgcctttccaagtactcatgtcaaggttggtttctttagctttgaacacagatttggatctttttgttttgtttccatatacataggacctgagagcttttggttgaattttttttttttcaggacaaatgggcgaagaatctgtacattgcatcaatatgctatggcaggacagtgtgctgatgatacacacttaagcatcatgtgttgtgttagaaagccgaagacaattggagcgagcctcagggtcgtcataataccaatcaaagacgtaaaaccagacgcagtctctttggttgaatgtgatgaaagggatgtgtcttggtatgtatgtacgagtaacaaaagagaagatgcaattgagtagtagaaagatttgagagctttttaaagcccttcaagtgtgtgcttttatcttattgatatcatccatttgcgttgtttaatgcgtctttagatatgtttctgtttctttctcagtgtctgaatatctgataagtgcaatgtgagaaagccacaccaaaccaaaatattcaaatcttatatttttaataatgtcgaatcactcggagttgccaccttctgtgccaattgtgctgaatctatcacactaaaaaaaacatttcttcaaggtaatgacttgtggactatgttctgaattctcattaagtttttattttttgaagtttaagtttttaccttcttttttgaaaaatatcgttcataagatgtcacgccaggacatgagctacacatcacatattagcatgcagatgcggacgatttgtcactcacttcaaacacctaaaagagcttctctctcacagcacacacacatatgcatgcaatatttacacgtgatcgccatgcaaatctccattctcacctataaattagaggctcggcttcactttttactcaaaccaaaactcatcactacaagatccacaaccaaaaatggctgcaaggaacgtgagtgcggctcatgagatgcatgacgagaagaggatagctgttgtgggcatggctgttcagtatgctggatgcaaaacgaaagacgagttctgggaagttctcatgaatggaaaagttgagagcaaagtgatcagcgacaaacgtcttggttcaaattaccgtgctgaacactacaaagctgaaaggagcaagtatgctgacaccttctgcaatgagacatatggaactcttgatgagaacgaaatagacaatgagcatgaactccttttgaaccttgccaaacaagccttggctgaaacatctgtcaaagattcaacaagatgtggcatagtttctggatgcctcagcttcccgatggacaacctccaaggtgaactcttgaatgtgtaccagaaccatgttgagaagaaacttggtgccagagttttcaaagatgcctctcactggtcagaaagagaacagtccaacaaaccagaggctggtgacagaagaatcttcatggaccctgcttcctttgttgctgaggaactcaatcttggcgctctccactactctgttgatgctgcctgtgccactgcgctctatgtgctcagactggcgcaagatcacttggtctctggtgcagctgatgtgatgctttgtggtgcaacatgcctgccggagccgtttttcatactctctgggttctcaaccttccaagccatgcctgttggaacgggtcagaatgtgtccatgccgctgcacaaagattctcaaggattgacccctggtgaaggaggttccatcatggtcctcaaacgtttggatgacgcaatcagagatggagatcacatctatggaacacttttgggagccaatgtcagcaacagtggcactggtctgccacttaaaccccttttgccgtcagagaaaaagtgcctcatggacacctacacacgtatcaatgtgcatccccacaagattcagtatgttgaatgccatgcaactgggactccacaaggtgatcgtgtggaaattgatgctgtgaaggcttgctttgaaggcaaagtcccacgttttggaaccacaaaagggaactttggacacacattggtggcagctgggtttgctggcatgtgcaaagtgcttctctccatgaagcacgggatcattccacccactccgggaatagatgacgaaacgaagatggaccctctggttgtctctggtgaggccattccctggccagaaacgaatggagaaccgaagcgtgctggtctctcagcgtttggatttggtgggaccaatgctcatgctgtctttgaggaacatgacccaagcaatgctgcatgcactggccatgactccatttctgctctctctgcacgttgtggtggtgagtcaaacatgagaatagcaatcactgggatggatgccacttttggtgctttgaaaggattggatgcttttgaaagggccatctacactggtgctcatggtgctataccactcccagaaaagagatggagattcctggggaaagacaaggacttccttgatctttgtggagtcaaagcaacaccgcatggctgttacattgaagatgttgaagttgatttccagaggctgaggactccaatgactcctgaagatatgctcttgcctcaacagcttctggctgtcaccacaattgatagggccatattggactctggcatgaagaaaggtggaaatgtggctgtctttgtggggttggggaccgatcttgaactctaccgtcaccgtgcaagggttgctctcaaggagagagtgaggcctgaagccagcaagaaactcaatgacatgatgcagtacatcaatgattgtgggacaagcacttcttacaccagctacataggcaacttggttgcaacaagggtcagttcacaatggggcttcacgggaccttccttcacaatcacagaaggcaacaattctgtgtacagatgtgctgaacttggcaaatacctcttggaaacgggagaggttgatggggttgtggttgcgggtgttgatctctgtgggagtgctgagaacctttacgtcaagtcaaggcgtttcaaggtgtctacatctgacaccccgagagccagctttgatgcagctgctgatggttactttgttggagagggctgtggtgcatttgtgctcaagcgtgagacaagctgcaccaaggatgacagaatctatgcttgcatggatgccatagttcctggaaatgttccatctgcatgtttgagagaggcattggatcaagccagagtcaagcctggagacatcgagatgttggagctttctgctgattcagcgaggcatttgaaggacccgtctgttctcccaaaggaactcactgctgaggaagagattggcggacttcagacgattcttcgtgacgatgacaagctcccaaggaatgttgcaactggaagtgtcaaggccactgttggtgacactggttatgcttctggtgctgccagtttgattaaggctgcgctttgcatctacaaccgttacctgcccagcaatggagatgactgggatgaacctgcacctgaagcaccctgggacagcacactctttgcgtgccagacctcaagagcttggttgaagaaccctggtgagagacgttatgcggctgtttccggagtcagtgaaaccagaagttgctacagtgtgctgctttctgaagcagagggacactacgagagagagaacagaatcagtttggatgaggaagcacccaagctcattgtgttgagagcagactcccatgaagagattcttggaagattggacaagataagggaaaggttcttgcagcccacgggtgctgcacccagagagtctgaattgaaggcgcaagcccgtaggatctttcttgaactccttggtgagacccttgcccaagatgcagcttcatctggaagtcagaagccccttgctctcagcttggtctccactccatccaagctccagagagaggtggaacttgcggcaaaaggcattccgagatgtctcaagatgagacgtgattggagttcccctgctggaagcagatatgcgcctgagcctttggccagtgacagagttgccttcatgtatggagaaggaaggagcccttactatggcatcacacaagacattcataggatttggcctgaacttcatgaggtcatcaatgagaaaacaaaccgtctctgggctgaaggtgacagatgggtcatgccaagggccagcttcaagagtgagcttgagtcacaacagcaagagtttgacagaaacatgattgaaatgttccgtcttggaatcctcacctcaattgccttcacaaacctggcgagagatgttctcaacatcacgcccaaagcagcctttggactcagtttgggagagatttccatgatctttgctttctccaagaaaaacggtttgataagcgatcagttgacaaaggatttgagagagtcagatgtctggaacaaagctctggctgttgagttcaatgcgctcagagaagcctggggcattccacagtctgtcccaaaagatgagttctggcaaggttacatagtgaggggaacgaaacaagacatagaagcagccatagcaccagactcaaagtatgtgaggttgaccatcatcaatgatgccaacactgctctcatcagtggaaagcctgatgcatgcaaagctgcgattgctcgtcttggtggcaacatccctgcgcttccagtcactcaaggcatgtgtgggcattgcccagaggtgggaccttacaccaaggacatcgcaaagatccacgccaaccttgagttccctgtggttgatggtcttgatctctggactaccataaaccagaagaggcttgtgccaagagccacgggtgccaaagatgaatgggctccttcatcctttggggagtatgctggacagctctatgagaaacaagccaacttccctcagatagttgaaaccatctacaagcagaactatgatgtgtttgttgaagttgggccaaacaatcacagaagcacagcagtgagaaccacgcttggaccacagagaaaccaccttgctggtgccatagacaagcagaacgaggatgcttggacgacaatagtcaagctcgtggcttcattgaaggctcaccttgttcctggagtgaccatcagtccgctctaccactccaagctcgttgcagaggctgaggcttgttatgctgcgctctgtaaaggtgagaaacccaagaaaaacaagtttgtgagaaagattcagttgaatggcagattcaacagcaaggcagaccccatctcctcagcagaccttgcatccttcccacctgcggaccctgcgattgaagctgccatctcttcaaggatcatgaagcctgtggctccgaaattctatgcgcgtctcaacattgatgagcaagatgagaccagagatccgatcttgaacaaggacaatgcgccttccagctccagctcttccagcagttcctcttccagcagttcatctccgtctcctgctccttcagctccagttcagaagaaagctgccccagctgcggagacaaaagctgttgccagtgctgatgcacttcgtagtgccctgcttgatcttgactccatgcttgcgctcagctctgcaagtgcttctggcaaccttgttgagactgcgccatctgatgccagtgtcattgtccctccgtgcaacattgctgatcttggcagcagagctttcatgaaaacttatggtgtttctgcgcctctgtacaccggtgcaatggccaagggaattgcctctgcggacttggtgatcgcagctggaaggcaaggaatccttgcgtcatttggtgctggaggccttccaatgcaagttgtgcgtgagtccattgaaaagattcaagctgccctgcccaatggaccatatgctgtcaacctcatccattctccttttgacagcaaccttgagaagggaaatgttgatctcttcttggaaaagggtgtcacttttgttgaggcttcagccttcatgacgttgacaccgcaagttgtcagatacagagcggctgggttgacgaggaatgcagatgggtcagtcaacataaggaacagaatcattgggaaagtctccagaactgagctggctgaaatgttcatgcgtcctgcacctgagcatcttttgcagaagctcattgcttctggggagatcaatcaagaacaagctgagttggccagacgtgttcctgtggctgatgacattgcggttgaagctgattctggtggacacactgacaaccgtccaatccatgtcattctgcctctgattatcaacctgagggataggcttcacagagagtgtggatacccagcaaacctgagggttcgtgttggtgctgggggtggcattgggtgtccccaagctgcgctggcaactttcaacatgggtgcctctttcattgtcactggaacagtgaaccaagttgccaaacaatctgggacgtgtgacaatgtgaggaaacagcttgcgaaagcaacttactcagatgtttgcatggcaccggcagctgacatgtttgaggaaggtgtgaaacttcaagttttgaagaaaggaacaatgttcccttcaagagccaacaaactctatgagttgttctgcaagtatgattcttttgagtccatgcctccagcagagcttgcgagggttgagaaaagaatcttcagtcgtgcattggaagaggtctgggatgagaccaagaacttctacatcaaccgtctccacaacccagagaagatacagagggctgagagggaccccaaactgaagatgtcactgtgtttcagatggtatctgtccctggcttcaaggtgggccaacactggagcttctgacagagtcatggactaccaagtttggtgtggtcctgccattggttcattcaatgatttcatcaaaggaacttaccttgatccggcagtggcaaatgagtacccgtgtgttgtgcagatcaacaaacagattcttagaggagcgtgcttcttgaggcgtcttgaaatactgagaaatgcaaggctttcagatggtgcagctgcacttgtggcgagcattgatgacacatatgtccctgctgagaagctgtgagtagttagcttaatcacttaggtcaccattccaaacgaaatatcctcgagagtgtgtataccacggtgatatgagtgtggttgttgatgtatgttaacactacatagtcatggtgtgtgttccataaataatgtactaatgtaataagaactactccgtagacggtaataaaagagaagtttttttttttactcttgctactttcctataaagtgatgattaacaacagatacaccaaaaagaaaacaattaatctatattcacaatgaagcagtactagtctattgaacatgtcagattttctttttctagatgtctaatcaagccttcaaggctagtgataaaagatcatccaatgggatccaacaaagactcaaatctggttttgatcagatacttcgaaactatttttgtatgcactaaattatgcaagtgttcttttatttggtgaagactctttagaagcaaagaacgataagcagtaataaaaaaaataaagttcagttttaagatttgttattgacttagcggccgcttaattaaactagtgctagcctcgaggtcgaccaacttttctatacaaagttgtctagacctaggactaggcactgagtgactcactgacctgactgagtgactggcggccgcagcttatagtaaagatttttttgttaataaaatgaaagttaatatttatggatttatttgaacatatttacaagtttttgttaataaatttatttacagaagtgttaaatttgaaaatgtgttaaatgagagttaatatttatggatataatattactttatttaaaaataaaatgaatttatattaaaatatgatttggtaaaagatattataaagaggaacttggatgagaaagacgacgatgggcaaaagttgcatggcacaccgcttttgttcagtaacatctgcactgtggcgcctttttcacactcaccatgcatgctgccacgtcagctttcacactatgacaccactggccatacacgttgccacctcagctttctcctcttctcactatgacacgactggccatgcatgcatgcatgctgccacctcagctcccgcctcttcacccgtgtctttctctcatgtcgcagtgctgcgtgccaacctcttctctctataaatagagagaagagaatgatggttaaactcaaaccaaaacaagaaaacatacacaaatagcaaaacggatccacaaccaaaaatggcgcttcgtgtcaagaccaacaagaagccatgttgggagatgaccaaggaggaactgacctctggcaaaactgaggtgttcaactatgaggaactcctggagtttgcagagggtgacatagctaaggtttttggtccggagtttgctgtcatagacaagtaccccagaagggtgaggctgcctgctcgtgaatacctgcttgtgacaagggtcacactcatggatgccgaggtcaacaactacagagttggtgccagaatggtcactgagtatgatcttccagtgaatggcgaattgtctgagggaggtgattgtccctgggcagttctggttgagagtggacagtgcgatttgatgctgatatcatacatgggaattgatttccagaaccaaggtgacagagtttaccgtctgctcaacaccacgttgacattctatggggttgcccatgagggagagacccttgagtatgacatcagagtgaccggttttgccaaacgtttggatggtggcatctccatgttcttctttgagtatgactgctatgtcaatgggaggcttctcattgagatgagagatggctgtgctggcttcttcacaaatgaggagcttgatgcgggaaagggtgtggtgttcacaagaggggatttggctgccagagctaagattccaaagcaagatgtttctccctatgctgtcgctccctgccttcacaaaacaaaactcaacgaaaaggagatgcagaccttggttgacaaagattgggcttccgtttttggctcaaagaatggcatgccggagatcaactacaaactctgcgcacgtaagatgctcatgattgatagagtcaccagcattgaccataagggaggtgtgtacggtttgggtcagttggttggtgagaaaatcttggagagggaccattggtacttcccatgccattttgttaaggatcaagtcatggctggatctcttgtcagcgacggttgttcacaaatgctcaagatgtacatgatctggctcggtttgcaccttaccaccggaccatttgacttcagacccgtcaacggacacccgaacaaagttaggtgtaggggtcagatatctcctcataagggaaagttggtctacgtcatggagatcaaagagatgggattcgacgaggataacgatccgtacgccattgctgacgtcaacatcattgacgttgatttcgaaaagggtcaagatttcagccttgatagaatcagcgactacggaaagggggatcttaacaaaaagatcgtcgtggacttcaagggcattgctctcaagatgcagaagagatccacgaacaagaacccctccaaagttcagcccgtttttgctaacggtgcagccactgtgggaccggaagcgtccaaggccagctctggtgccagtgctagtgcttctgctgcccctgcgaagcctgctttctcagcagatgttcttgcgccaaagccagttgcacttcctgaacatatcctcaagggtgacgctctcgctccgaaagaaatgtcctggcatcccatgtcaaaacttcctggcaacccgacgccgttcttctcccctagttcttaccctccgagggcaatttgcttcatccctttccctggcaacccacttgacaacaattgcaaagctggagaaatgcctctgaactggtacaacatgtcagagttcatgtgtggaaaagttagcaactgcttgggaccagagttcgcaagatttgataagtcaaatacgagcagaagccctgcttttgatttggctcttgtgactagagttgttgaagtcacaaacatggaacatggcaagttcctgaatgttgattgcaatcccagcaaaggcacaatggtgggggagtttgactgtcctcaagatgcgtggttctttgatggttcttgcaatgatgggcacatgccttattccatcatcatggaaatcggacttcagacatccggtgttctcaccagtgtgttgaaagcaccactgacgatggacaaagatgacattctctttaggaaccttgatgcaagtgctgaaatggtgaggccagatgtggatgtgagggggaaaaccataaggaatgtgaccaagtgcactggatatgcaatgttgggaaagatggggattcacagattcacgtttgagttgtctgttgatggcgtggttttctacaaaggaagcacttcctttggatggttcactccagaggtgtttgctcagcaagctggacttgacaatgggaaaaagacggagccttggtgcaaaactaacaacacgagtgtgagaagagttgaaatcgcatcagccaaaggcaaagaacagctgactgagaaacttccagatgcaactaatgctcaagttctcagaaggtcagaacagtgtgagtatttggattacctcaacattgctcctgattctgggctgcatgggaaaggatatgcgcatggacacaaagatgttaacccacaagactggttcttctcttgtcacttttggtttgatcctgtgatgcctggatctttgggaattgagtcaatgttccagctcattgaggcatttgcggtggaccagaacataccgggagaatacaatgtgagcaatccgacctttgcccatgcccctggaaaaacggcgtggaagtaccgtggtcaattgacaccaaagaaccgtgcgatggactgtgaggtgcacatagtttcaatcacagcctctcctgaaaatggaggctacgttgacatagtggcagatggagcactttgggttgatggtctccgtgtgtatgaagccaaagaactcagagttcgtgttgtcagtgcaaaacctcaagccattccggatgttcaacaacagccacccagcgcaaaagcggaccctgggaaaactggagttgcactcagtccgactcagttgagagatgtcctgcttgaagtggacaatccattgtatcttggtgttgaaaactccaatttggtgcagtttgaatccaaacctgcaacttcttcaaggattgtcagtatcaaaccatgctccataagtgatcttggtgacaagtccttcatggaaacgtacaatgtgtcagcacctctgtacactggagcaatggccaagggaattgcgtctgcggaccttgtcattgctgctgggaagaggaagatattgggttcttttggagcgggtgggcttccaatgcaccatgtgagggcagctttggagaagatacaagcggctctgcctcaaggaccatatgctgtgaacctcattcattcaccttttgacagcaacttggaaaaggggaatgttgatctcttcctcgaaaagggcgttactgtggtggaggcttctgcattcatgaccctcactccccaagttgttcgttaccgtgcagccggactctcaaggaacgctgatgggagtgtcaacatcagaaaccgtatcattggaaaagtgtccagaacagaactcgccgaaatgttcatcagaccggctccggaacacctccttgagaaactcatagcttctggtgagataacacaagaacaagccgaacttgcccgtcgtgttcctgtcgcagacgacatcgctgttgaagctgattctggtggtcacactgacaaccgtcccatccacgtcatcttgcctttgatcatcaaccttaggaacagactgcacagagagtgtggttatcctgcgcaccttagagtcagagttggagctggaggcggtgttggctgcccacaagctgctgcggctgccctcacaatgggagctgccttcatagtgactgggactgtcaatcaagttgctaaacagtccgggacatgtgacaacgtgagaaaacaactcagtcaagccacctacagtgacatttgcatggctccagcagctgatatgtttgaggaaggtgtgaaactccaagttctcaagaagggaacaatgttcccatcaagagctaacaaattgtacgaactcttttgcaagtacgactctttcgattcaatgcctcctgctgaacttgaaaggatcgagaagaggatcttcaagagggcacttcaagaggtctgggaagagaccaaggacttttacatcaatggtttgaagaatccagagaagatacagagagcggaacatgaccccaaactcaagatgtctttgtgtttcagatggtatcttggtcttgcatcacgttgggccaacatgggtgctcctgatcgtgtcatggactatcaagtctggtgtggtccagccattggagccttcaatgacttcatcaaaggaacatatcttgatcctgctgtctctaatgagtacccatgtgttgtccagatcaaccttcagattttgcgtggtgcatgttacctgaggcgtcttaatgctctgagaaatgatccgaggattgatcttgagactgaagatgctgcctttgtctatgagccaacgaatgcgctttgagtagttagcttaatcacttaggtcacccagtccaagcccggcctagcacgatgatcatgagtgttgctattgatgtatgttaatactatacacagtcatcgtgtgtgttttataaaactgtaagcttaggatgtttgaggctaatgtaattagcactacaccgtaataaatgagaggtttactttatgttttaataatgttcttacccttgctgctctctaaactgtaatggcgtacggttagctaaactaaagtaaaaatcgattcgcttgagtaaaattagtgaccgggaaagatcatcgactactactgctcagagatgtaatcggtaattaagacttcaagctcaataattaattaggagtaaatctggcttcgaatttttaaattgtcaacttccaaagaaggattggcaagactcaatctcaattgcccaacaaacatatggctctttacaaatttggaatctctttttgatggcaagaacgtcgtaattcctctgtcgatctcatgtaattaccaaactcatctacttattactttctttatatgcacttactgatgcggccgcttaattaatcacgagtggatgactgtcacgactgactcatgactgactactagtgctagcctcgaggtcgacacaactttgtataataaagttgtctagacctaggagctgtgctgggtaactcacatgagtcactggtcacatcagcggccgcagatctgattggtaagatatgggtactgtttggtttatatgttttgactattcagtcactatggcccccataaattttaattcggctggtatgtctcggttaagaccggtttgacatggttcatttcagttcaattatgttaatctggcacgtgatatgtttaccttcacacgaacattagtaatgatgggctaatttaagacttaacaggcctagagaggcccatcttattacgtaacggcgtcgtttagagtgcaccaagcttataaatgaaaacgagctacctcgggacatcacgctctttgtacactccgccatctctctctctcgttggagcagatctctctcgtgaatatcgacaatgcttcagcacacttggcttccgaagcctcccaatctgaccctcttgtcagatgaggttcatctctggaggattcctcttgaccagcctgagtcacaacttcaagaccttgctgccaccctgagcagtgatgaattggcgagggcaaacagattctactttccagaacacagaaggcgtttcactgctgggagaggcatcctcagatccatcttgggtggatacttgggagtggaaccgggtcaagtcaagtttgattatgagtcccgtgggaaaccgatccttggtgacagatttgctgagagtggactcctgttcaacttgtctcacagccagaaccttgccttgtgtgctgtcaactacacgcgtcaaataggcattgatcttgaatatctgcgtccaacatctgacttggagtctcttgcaaagaggttctttctcccaagagaatatgaactcttgaggtcactccctgatgagcagaaacagaagattttctttcgttactggacttgcaaagaggcttatctcaaagcaacgggagatggaatagccaaacttgaagagatcgagatagcactcaccccaacagaacctgccaagctccaaacagctcctgcgtggtctctgttggagcttgtgccagatgacaattgtgttgcagctgtggctgttgcgggttttggttggcagcccaagttctggcattactgagtagttagcttaatcacttaggtcaccctatcaaaatctatttagaaatacacaatattttgttgcaggcttgctggagaatcgatctgctatcataaaaattacaaaaaaattttatttgcctcaattattttaggattggtattaaggacgcttaaattatttgtcgggtcactacgcatcattgtgattgagaagatcagcgatacgaaatattcgtagtactatcgataatttatttgaaaattcataagaaaagcaaacgttacatgaattgatgaaacaatacaaagacagataaagccacgcacatttaggatattggccgagattactgaatattgagtaagatcacggaatttctgacaggagcatgtcttcaattcagcccaaatggcagttgaaatactcaaaccgccccatatgcaggagcggatcattcattgtttgtttggttgcctttgccaacatgggagtccaaggttgcggccgcttaattaactactgtcactgaggccgtagacgagtacggactgatctaactagtgctagcctcgaggtcgacacccagctttcttgtacaaagtggttgcggccgcttaattaaatttaaattcaattaatgcaatcttgattttcaacaacgaaggtaatggcgtaaaagaaaaaatgtatgttattgtattgatctttcatgatgttgaagcgtgccataatatgatgatgtataattaaaatattaactgtcgcattttattgaaatggcactgttatttcaaccatatctttgattctgttacatgacacgactgcaagaagtaaataatagacgccgttgttaaagaattgctatcatatgtgcctaactagagggaatttgagcgtcagacctaatcaaatattacaaaatatctcactctgtcgccagcaatggtgtaatcagcgcagacaaatggcgtaaagatcgcggaaaaacctccccgagtggcatgatagctgcctctgtattgctgatttagtcagccttatttgacttaagggtgccctcgttagtgacaaattgctttcaaggagacagccatgccccacactttgttgaaaaacaaattgcctttggggagacggtaaagccagttgctcttcaataaggaatgtcgaggaggcaatgtaaccgcctctggtagtacacttctctaatccaaaaatcaatttgtattcaagataccgcaaaaaacttatggtttaaaccctgcaggactagtccagaaggtaattatccaagatgtagcatcaagaatccaatgtttacgggaaaaactatggaagtattatgtaagctcagcaagaagcagatcaatatgcggcacatatgcaacctatgttcaaaaatgaagaatgtacagatacaagatcctatactgccagaatacgaagaagaatacgtagaaattgaaaaagaagaaccaggcgaagaaaagaatcttgaagacgtaagcactgacgacaacaatgaaaagaagaagataaggtcggtgattgtgaaagagacatagaggacacatgtaaggtggaaaatgtaagggcggaaagtaaccttatcacaaaggaatcttatcccccactacttatccttttatatttttccgtgtcatttttgcccttgagttttcctatataaggaaccaagttcggcatttgtgaaaacaagaaaaaatttggtgtaagctattttctttgaagtactgaggatacaacttcagagaaatttgtaagtttgtaggtaccagatctggatcccaaaccatgtctccggagaggagaccagttgagattaggccagctacagcagctgatatggccgcggtttgtgatatcgttaaccattacattgagacgtctacagtgaactttaggacagagccacaaacaccacaagagtggattgatgatctagagaggttgcaagatagatacccttggttggttgctgaggttgagggtgttgtggctggtattgcttacgctgggccctggaaggctaggaacgcttacgattggacagttgagagtactgtttacgtgtcacataggcatcaaaggttgggcctaggatctacattgtacacacatttgcttaagtctatggaggcgcaaggttttaagtctgtggttgctgttataggccttccaaacgatccatctgttaggttgcatgaggctttgggatacacagcccggggtacattgcgcgcagctggatacaagcatggtggatggcatgatgttggtttttggcaaagggattttgagttgccagctcctccaaggccagttaggccagttacccaaatctgagtagttagcttaatcacctagagctcgatcggcggcaatagcttcttagcgccatcccgggttgatcctatctgtgttgaaatagttgcggtgggcaaggctctctttcagaaagacaggcggccaaaggaacccaaggtgaggtgggctatggctctcagttccttgtggaagcgcttggtctaaggtgcagaggtgttagcgggatgaagcaaaagtgtccgattgtaacaagatatgttgatcctacgtaaggatattaaagtatgtattcatcactaatataatcagtgtattccaatatgtactacgatttccaatgtctttattgtcgccgtatgtaatcggcgtcacaaaataatccccggtgactttcttttaatccaggatgaaataatatgttattataatttttgcgatttggtccgttataggaattgaagtgtgcttgaggtcggtcgccaccactcccatttcataattttacatgtatttgaaaaataaaaatttatggtattcaatttaaacacgtatacttgtaaagaatgatatcttgaaagaaatatagtttaaatatttattgataaaataacaagtcaggtattatagtccaagcaaaaacataaatttattgatgcaagtttaaattcagaaatatttcaataactgattatatcagctggtacattgccgtagatgaaagactgagtgcgatattatggtgtaatacataggaattcgtttaaacgatctgcgtctaattttcggtccaacttgcacaggaaagacgtcgaccgcggtagctcttgcccagcagactgggcttccagtcctttcgctcgatcgggtccaatgttgtcctcagctgtgaaccggaagcggacgaccaacagtggaagaactgaaaggaacgagccgtctataccttgatgatcggcctctggtgaagggtatcatcgcagccaagcaagctcatgaaaggctgatgggggaggtgtataattatgaggcccacggcgggcttattctttagggaggatctatctcgttgctcaagtgcatggcgcaaagcagttattggagtgcggattttcgttggcatattattcgccacgagttagcagacgaagagaccttcatgaacgtggccaaggccagagttaagcagatgttacgccctgctgcaggcctttctattatccaatagttggttgatctttggaaagagcctcggctgaggcccatactgaaagagatcgatggatatcgatatgccatgttgtttgctagccagaaccagatcacatccgatatgctattgcagcttgacgcagatatggaggataagttgattcatgggatcgctcaggagtagctcatccatgcacgccgacaagaacagaaattccgtcgagttaacgcagccgcttacgacggattcgaaggtcatccattcggaatgtattagtttgcaccagctccgcgtcacacctgtcttcatttgaataagatgttagcaattgtttttagctttgtcttgttgtggcagggcggcaagtgcttcagacatcattctgttttcaaattttatgctggagaacagcttcttaattcctttggaaataatagactgcgtcttaaaattcagatgtctggatatagatatgattgtaaaataacctatttaagtgtcatttagaacataagttttatgaatgttcttccattttcgtcatcgaacgaataagagtaaatacaccttttttaacattacaaataagttcttatacgttgtttatacaccgggaatcatttccattattttcgcgcaaaagtcacggatattcgtgaaagcgacataaactgcgaaatttgcggggagtgtcttgagtttgcctcgaggctagcgcatgcacatagacacacacatcatctcattgatgcttggtaataattgtcattagattgtttttatgcatagatgcactcgaaatcagccaattttagacaagtatcaaacggatgtgacttcagtacattaaaaacgtccgcaatgtgttattaagttgtctaagcgtcaatttgatttacaattgaatatatcctgccccagccagccaacagctcgatttacaattgaatatatcctgccggccggcccacgcgtgtcgaggaattctgatctggcccccatttggacgtgaatgtagacacgtcgaaataaagatttccgaattagaataatttgtttattgctttcgcctataaatacgacggatcgtaatttgtcgttttatcaaaatgtactttcattttataataacgctgcggacatctacatttttgaattgaaaaaaaattggtaattactctttctttttctccatattgaccatcatactcattgctgatccatgtagatttcccggacatgaagccatttacaattgaatatatcctgccgccgctgccgctttgcacccggtggagcttgcatgttggtttctacgcagaactgagccggttaggcagataatttccattgagaactgagccatgtgcaccttccccccaacacggtgagcgacggggcaacggagtgatccacatgggacttttaaacatcatccgtcggatggcgttgcgagagaagcagtcgatccgtgagatcagccgacgcaccgggcaggcgcgcaacacgatcgcaaagtatttgaacgcaggtacaatcgagccgacgttcacgcggaacgaccaagcaagcttggctgccatttttggggtgaggccgttcgcggccgaggggcgcagcccctggggggatgggaggcccgcgttagcgggccgggagggttcgagaagggggggcaccccccttcggcgtgcgcggtcacgcgcacagggcgcagccctggttaaaaacaaggtttataaatattggtttaaaagcaggttaaaagacaggttagcggtggccgaaaaacgggcggaaacccttgcaaatgctggattttctgcctgtggacagcccctcaaatgtcaataggtgcgcccctcatctgtcagcactctgcccctcaagtgtcaaggatcgcgcccctcatctgtcagtagtcgcgcccctcaagtgtcaataccgcagggcacttatccccaggcttgtccacatcatctgtgggaaactcgcgtaaaatcaggcgttttcgccgatttgcgaggctggccagctccacgtcgccggccgaaatcgagcctgcccctcatctgtcaacgccgcgccgggtgagtcggcccctcaagtgtcaacgtccgcccctcatctgtcagtgagggccaagttttccgcgaggtatccacaacgccggcggccgcggtgtctcgcacacggcttcgacggcgtttctggcgcgtttgcagggccatagacggccgccagcccagcggcgagggcaaccagcccggtgagcgtcggaaagggtcgacggatcttttccgctgcataaccctgcttcggggtcattatagcgattttttcggtatatccatcctttttcgcacgatatacaggattttgccaaagggttcgtgtagactttccttggtgtatccaacggcgtcagccgggcaggataggtgaagtaggcccacccgcgagcgggtgttccttcttcactgtcccttattcgcacctggcggtgctcaacgggaatcctgctctgcgaggctggccggctaccgccggcgtaacagatgagggcaagcggatggctgatgaaaccaagccaaccaggaagggcagcccacctatcaaggtgtactgccttccagacgaacgaagagcgattgaggaaaaggcggcggcggccggcatgagcctgtcggcctacctgctggccgtcggccagggctacaaaatcacgggcgtcgtggactatgagcacgtccgcgagctggcccgcatcaatggcgacctgggccgcctgggcggcctgctgaaactctggctcaccgacgacccgcgcacggcgcggttcggtgatgccacgatcctcgccctgctggcgaagatcgaagagaagcaggacgagcttggcaaggtcatgatgggcgtggtccgcccgagggcagagccatgacttttttagccgctaaaacggccggggggtgcgcgtgattgccaagcacgtccccatgcgctccatcaagaagagcgacttcgcggagctggtattcgtgcagggcaagattcggaataccaagtacgagaaggacggccagacggtctacgggaccgacttcattgccgataaggtggattatctggacaccaaggcaccaggcgggtcaaatcaggaataagggcacattgccccggcgtgagtcggggcaatcccgcaaggagggtgaatgaatcggacgtttgaccggaaggcatacaggcaagaactgatcgacgcggggttttccgccgaggatgccgaaaccatcgcaagccgcaccgtcatgcgtgcgccccgcgaaaccttccagtccgtcggctcgatggtccagcaagctacggccaagatcgagcgcgacagcgtgcaactggctccccctgccctgcccgcgccatcggccgccgtggagcgttcgcgtcgtctcgaacaggaggcggcaggtttggcgaagtcgatgaccatcgacacgcgaggaactatgacgaccaagaagcgaaaaaccgccggcgaggacctggcaaaacaggtcagcgaggccaagcaggccgcgttgctgaaacacacgaagcagcagatcaaggaaatgcagctttccttgttcgatattgcgccgtggccggacacgatgcgagcgatgccaaacgacacggcccgctctgccctgttcaccacgcgcaacaagaaaatcccgcgcgaggcgctgcaaaacaaggtcattttccacgtcaacaaggacgtgaagatcacctacaccggcgtcgagctgcgggccgacgatgacgaactggtgtggcagcaggtgttggagtacgcgaagcgcacccctatcggcgagccgatcaccttcacgttctacgagctttgccaggacctgggctggtcgatcaatggccggtattacacgaaggccgaggaatgcctgtcgcgcctacaggcgacggcgatgggcttcacgtccgaccgcgttgggcacctggaatcggtgtcgctgctgcaccgcttccgcgtcctggaccgtggcaagaaaacgtcccgttgccaggtcctgatcgacgaggaaatcgtcgtgctgtttgctggcgaccactacacgaaattcatatgggagaagtaccgcaagctgtcgccgacggcccgacggatgttcgactatttcagctcgcaccgggagccgtacccgctcaagctggaaaccttccgcctcatgtgcggatcggattccacccgcgtgaagaagtggcgcgagcaggtcggcgaagcctgcgaagagttgcgaggcagcggcctggtggaacacgcctgggtcaatgatgacctggtgcattgcaaacgctagggccttgtggggtcagttccggctgggggttcagcagccagcgctttactggcatttcaggaacaagcgggcactgctcgacgcacttgcttcgctcagtatcgctcgggacgcacggcgcgctctacgaactgccgataaacagaggattaaaattgacaattgtgattaaggctcagattcgacggcttggagcggccgacgtgcaggatttccgcgagatccgattgtcggccctgaagaaagctccagagatgttcgggtccgtttacgagcacgaggagaaaaagcccatggaggcgttcgctgaacggttgcgagatgccgtggcattcggcgcctacatcgacggcgagatcattgggctgtcggtcttcaaacaggaggacggccccaaggacgctcacaaggcgcatctgtccggcgttttcgtggagcccgaacagcgaggccgaggggtcgccggtatgctgctgcgggcgttgccggcgggtttattgctcgtgatgatcgtccgacagattccaacgggaatctggtggatgcgcatcttcatcctcggcgcacttaatatttcgctattctggagcttgttgtttatttcggtctaccgcctgccgggcggggtcgcggcgacggtaggcgctgtgcagccgctgatggtcgtgttcatctctgccgctctgctaggtagcccgatacgattgatggcggtcctgggggctatttgcggaactgcgggcgtggcgctgttggtgttgacaccaaacgcagcgctagatcctgtcggcgtcgcagcgggcctggcgggggcggtttccatggcgttcggaaccgtgctgacccgcaagtggcaacctcccgtgcctctgctcacctttaccgcctggcaactggcggccggaggacttctgctcgttccagtagctttagtgtttgatccgccaatcccgatgcctacaggaaccaatgttctcggcctggcgtggctcggcctgatcggagcgggtttaacctacttcctttggttccgggggatctcgcgactcgaacctacagttgtttccttactgggctttctcagcccccgagcgcttagtgggaatttgtaccccttatcgaaccgggagcacaggatgacgcctaacaattcattcaagccgacaccgcttcgcggcgcggcttaattcaggagttaaacatcatgagggaagcggtgatcgccgaagtatcgactcaactatcagaggtagttggcgtcatcgagcgccatctcgaaccgacgttgctggccgtacatttgtacggctccgcagtggatggcggcctgaagccacacagtgatattgatttgctggttacggtgaccgtaaggcttgatgaaacaacgcggcgagctttgatcaacgaccttttggaaacttcggcttcccctggagagagcgagattctccgcgctgtagaagtcaccattgttgtgcacgacgacatcattccgtggcgttatccagctaagcgcgaactgcaatttggagaatggcagcgcaatgacattcttgcaggtatcttcgagccagccacgatcgacattgatctggctatcttgctgacaaaagcaagagaacatagcgttgccttggtaggtccagcggcggaggaactctttgatccggttcctgaacaggatctatttgaggcgctaaatgaaaccttaacgctatggaactcgccgcccgactgggctggcgatgagcgaaatgtagtgcttacgttgtcccgcatttggtacagcgcagtaaccggcaaaatcgcgccgaaggatgtcgctgccgactgggcaatggagcgcctgccggcccagtatcagcccgtcatacttgaagctaggcaggcttatcttggacaagaagatcgcttggcctcgcgcgcagatcagttggaagaatttgttcactacgtgaaaggcgagatcaccaaggtagtcggcaaataatgtctaacaattcgttcaagccgacgccgcttcgcggcgcggcttaactcaagcgttagagagctggggaagactatgcgcgatctgttgaaggtggttctaagcctcgtcttgcgatggcatttcgatccattcccattccgcgctcaagatggcttcccctcggcagttcatcagggctaaatcaatctagccgacttgtccggtgaaatgggctgcactccaacagaaacaatcaaacaaacatacacagcgacttattcacacgagctcaaattacaacggtatatatcctgccagtcagcatcatcacaccaaaagttaggcccgaatagtttgaaattagaaagctcgcaattgaggtctacaggccaaattcgctcttagccgtacaatattactcaccggatcctaaccggtttaattaaggcgcgccatgcccgggcaagcggccgcacaagttt

SEQ ID NO: 61 - DNA, 38239 bp, Artificial sequence
  plasmid pDAB109508
gtacaaaaaagcaggcttctagacctaggtggagtcatcacgcagactatctcagcatgtgcgtagcacgcggccgcctcccagtatcattatagtgaaagttttggctctctcgccggtggttttttacctctatttaaaggggttttccacctaaaaattctggtatcattctcactttacttgttactttaatttctcataatctttggttgaaattatcacgcttccgcacacgatatccctacaaatttattatttgttaaacattttcaaaccgcataaaattttatgaagtcccgtctatctttaatgtagtctaacattttcatattgaaatatataatttacttaattttagcgttggtagaaagcataatgatttattcttattcttcttcatataaatgtttaatatacaatataaacaaattctttaccttaagaaggatttcccattttatattttaaaaatatatttatcaaatatttttcaaccacgtaaatctcataataataagttgtttcaaaagtaataaaatttaactccataatttttttattcgactgatcttaaagcaacacccagtgacacaactagccatttttttctttgaataaaaaaatccaattatcattgtattttttttatacaatgaaaatttcaccaaacaatgatttgtggtatttctgaagcaagtcatgttatgcaaaattctataattcccatttgacactacggaagtaactgaagatctgcttttacatgcgagacacatcttctaaagtaattttaataatagttactatattcaagatttcatatatcaaatactcaatattacttctaaaaaattaattagatataattaaaatattacttttttaattttaagtttaattgttgaatttgtgactattgatttattattctactatgtttaaattgttttatagatagtttaaagtaaatataagtaatgtagtagagtgttagagtgttaccctaaaccataaactataagatttatggtggactaattttcatatatttcttattgcttttaccttttcttggtatgtaagtccgtaactggaattactgtgggttgccatgacactctgtggtcttttggttcatgcatggatcttgcgcaagaaaaagacaaagaacaaagaaaaaagacaaaacagagagacaaaacgcaatcacacaaccaactcaaattagtcactggctgatcaagatcgccgcgtccatgtatgtctaaatgccatgcaaagcaacacgtgcttaacatgcactttaaatggctcacccatctcaacccacacacaaacacattgcctttttcttcatcatcaccacaaccacctgtatatattcattctcttccgccacctcaatttcttcacttcaacacacgtcaacctgcatatgcgtgtcatcccatgcccaaatctccatgcatgttccaaccaccttctctcttatataatacctataaatacctctaatatcactcacttctttcatcatccatccatccagagtactactactctactactataataccccaacccaactcatattcaatactactctaggatccacaaccaaaaatggcagcgaggctgcaagagcagaaaggaggtgagatggacacgaggattgcgatcataggcatgagcgccatacttccttgtggaaccacggtgagagagtcatgggagaccataagggctggcattgattgcctgtctgatcttcctgaggatcgtgttgatgtgactgcgtactttgacccagtcaagaccacaaaggacaaaatctactgcaagagaggaggtttcattcctgagtatgactttgatgcgcgtgagtttggtctcaacatgttccagatggaagattctgatgcgaatcagaccatctcacttctcaaggtcaaagaagcacttcaagatgctgggattgatgcacttggaaaggagaagaaaaacataggatgcgtgcttggcattggaggtggacagaagagttcacatgagttctacagcagactcaactatgtggttgtggagaaagtcttgagaaagatggggatgccagaggaagatgtcaaagtggctgtggagaagtacaaagcgaacttcccagaatggagacttgactctttccctggattccttgggaatgtcactgctggcagatgcaccaacacattcaacttggatggcatgaactgcgttgtggatgctgcatgtgcaagctccttgatagcagtcaaggttgcgattgatgaactgctctatggtgactgcgacatgatggtcactggtgcaacctgcacagacaactccattgggatgtacatggctttctcaaagacacctgtgttcagcacggacccaagtgtgagagcgtatgatgagaaaacgaaagggatgctcattggtgagggatcagccatgttggtgctcaaacgttatgcagatgcagtgagggatggtgatgagattcatgctgtgattcgtggttgtgcaagctcaagtgatggcaaagcagctggcatctacactcccacaatcagtggtcaagaggaagccttgagacgtgcatacaatcgtgcctgcgttgaccctgccactgtcactttggttgagggtcatgggactggcactccagttggagataggattgagttgactgcgttgaggaacttgtttgacaaagcgtatggtgaagggaacacagagaaagttgcagttggaagtatcaagtccagtattggtcatttgaaggctgttgctggtcttgctggaatgatcaaggtcatcatggctctcaaacacaagactttgcctggaacgatcaatgtggacaatccacccaatctctatgacaacactcccatcaatgagtcatccctctacatcaacacgatgaacagaccctggttccctccacctggtgttccgagacgtgctggaatatccagctttggctttggaggtgccaactaccatgcagtgttggaagaggctgaaccagagcacacgacagcgtacagactcaacaaacgtccacaaccggtgttgatgatggctgcaactcctgctgcgttgcagagcctttgtgaagctcagctgaaagagtttgaagctgcgatcaaggagaatgagacagtcaagaatactgcctacatcaagtgtgtcaagtttggagaacagttcaagttccctgggagcatacctgcgaccaatgcgagactgggattcttggtcaaagatgcggaggatgcgtgctccacgcttcgtgctatatgtgctcagtttgccaaagatgtgaccaaagaagcgtggaggcttccgagagaaggagtttctttccgtgccaaaggcattgccaccaatggtgctgttgctgcactcttctctggacaaggtgctcagtacacacacatgttcagtgaagttgcgatgaactggcctcagttcagacagtccattgctgcaatggacgctgcacagtccaaggttgctggaagtgacaaagactttgaaagagtctctcaagtcctgtacccaaggaaaccgtacgaacgtgagccagaacaagatcacaagaaaatctcactcacagcatacagccagccgtcaaccctggcatgtgctcttggtgcctttgagattttcaaggaagctggattcactccagactttgcagctggacacagcttgggtgagtttgctgcgctctatgcagctggttgtgttgacagagatgagttgtttgaacttgtttgcagaagggcaaggatcatgggaggcaaagatgcacctgccacacccaaaggttgcatggcagctgtcataggacccaacgcagagaacatcaaggttcaagctgccaacgtctggcttggaaactcaaactctccgtctcagactgtcattactgggtctgttgaagggattcaagctgaaagtgccagattgcagaaggaagggttcagagttgtgcctcttgcttgtgagtctgccttccattctccacagatggaaaatgccagctcagctttcaaagatgtcatatccaaggtttccttccgtacacccaaagcagaaacaaagctcttcagcaatgtttctggagagacctatccgacggatgccagagagatgctcactcaacacatgacctcatctgtgaagttcctgacccaagtgaggaacatgcaccaagctggtgcgagaatctttgttgagtttggaccgaaacaagttctcagcaaacttgtttctgaaaccctcaaagatgacccgtctgttgtcacagtgtctgtgaacccagcttctggcacggactctgacatacagttgagggatgctgcagttcagctggttgtggctggtgtcaatcttcaagggtttgacaagtgggatgctcctgatgccacgaggatgcaagccatcaagaaaaagagaaccacactcagactttcagctgccacctatgtcagtgacaagaccaagaaagtgagggatgctgccatgaacgacggaagatgtgtcacatacctcaagggtgctgcaccactcatcaaggctcctgaacctgtggttgacgaagctgccaagagggaggctgaaaggcttcagaaggagcttcaagacgctcagaggcagcttgacgacgccaaacgtgcagctgcagaagccaactccaaacttgctgctgccaaggaggaagccaagactgctgcagcttcagccaagcctgcagttgacactgctgttgtggagaaacatcgtgccatcctcaagtccatgctggctgagctggatggttatggaagtgttgatgcttcttcccttcagcaacagcaacagcaacagactgctccggcgcctgttaaagccgctgcccctgccgctcccgttgcaagtgctcctgctcccgccgtgtccaacgagttgcttgagaaagctgagacagttgtgatggaggttctcgctgccaagactggatacgaaacagacatgattgaggcggacatggagcttgagactgagttgggaattgacagcatcaagagggttgaaattctttctgaagtccaagctatgcttaacgttgaggcgaaagatgttgatgctctctctaggacgagaacagtgggtgaagttgtcaacgctatgaaggcagaaatcgctggttcttccgctccggcgccggcagctgccgcacctgcaccggctaaagcggctccagctgcagctgcaccagctgtttctaatgagctgctcgaaaaggcagaaactgttgtgatggaagtccttgctgccaaaactggctacgaaactgacatgatagaatcagacatggagcttgagacggagcttggaattgattccatcaagcgtgtggaaatcctcagtgaagtccaagccatgctcaatgtggaagctaaggatgtggatgctctctcaaggaccagaactgtcggtgaggttgtcaatgccatgaaggctgagatagctggaggctccgctcctgcgccggccgctgccgctcctggtcccgctgccgcggctccagctccagctgcagccgctccggccgtctcaaacgaactccttgaaaaagctgagaccgtcgtgatggaggtcttggcagctaaaaccggctatgagactgacatgattgagtctgacatggaattggagacagaacttgggatagacagcatcaaacgtgttgaaatcctcagtgaggtccaagctatgctgaacgtggaagcgaaggatgttgatgctctgtccagaacgaggaccgttggtgaggttgtggatgccatgaaggctgaaattgctggagggtctgcgcccgcgccagctgcagccgctcctgcacccgcagccgcggcacctgctccagctgcacctgcacctgccgtttcttcagaactcttggagaaggctgagacggttgtgatggaggttttggctgcaaagactggctatgagaccgacatgattgaatctgatatggaattggagacagagcttgggatcgattccatcaaaagagtggagatcctgagtgaagtccaagccatgctcaatgttgaagctaaggatgttgatgcactttcaagaacaaggacagtgggtgaggttgtggatgccatgaaggcggagattgctggagggagcgcgcctgcgccagctgccgcggcacctgcaccggcagccgcagctccagctccagctgcaccagcaccggccgcgcccgcgccagctgtttcatccgaactcctggaaaaggccgagacggttgtgatggaggtgctcgcagctaagactggttacgagaccgacatgattgaaagtgacatggagcttgaaaccgagttgggaatagatagcatcaaacgtgttgaaatcttgtctgaggtccaagctatgttgaacgtggaggcaaaagatgtcgatgcgctttcaagaaccagaacagtcggtgaggtcgtggacgccatgaaggctgaaattgccggaagctctgctagtgcgccagctgcagccgcacctgcacctgctgccgcggcacctgctccagctgcagccgctcctgccgtcagcaatgagttgctggagaaagccgaaacagttgtgatggaagtccttgctgcaaaaactggttacgaaacggacatgattgagtcagacatggaattggagaccgaacttggaatagattccatcaagagagtggagatcctctctgaggtgcaagccatgctcaacgttgaggctaaagatgttgatgcactcagtaggacaagaactgtgggggaagttgtcgatgcgatgaaggctgagattgctggaggctctgctcctgcgccggcagctgccgcacctgcacccgcagccgcggcaccagctgtcagcaacgaattgcttgagaaggctgaaacagttgtcatggaagtgctggctgcaaaaaccggctatgagactgacatgattgagtctgacatggaacttgagacggaattgggcattgacagcatcaagcgtgttgagatcctcagtgaagtccaagcaatgctcaatgtggaggctaaggatgtggatgccctctcaaggaccagaacagttggtgaggtcgttgatgcgatgaaggcggagatcgctggaagttccgcgcctgcgccagctgcagccgctcctgcacccgcagccgcggcaccggctccagctgcagccgcaccggccgtctcctcagaactcctggaaaaggctgagacagttgtgatggaagtccttgctgcgaaaactggctatgagaccgacatgattgaatctgacatggaactggagaccgagcttggaattgactccatcaaacgtgttgaaatcctctctgaggttcaagcgatgttgaatgtggaggccaaagatgttgatgctctttccagaacaaggacggtgggagaggtggttgatgccatgaaggctgagatagctgggggttctgctcctgcgccagctgcagccgctcctgctcccgctgccgcggcaccagctgtcagcaacgaactccttgaaaaagctgaaactgttgtgatggaggttttggctgcaaagactggatacgagactgacatgatagagtcagacatggagttggaaacagagcttgggattgatagcatcaagcgtgtggaaatcctttctgaggttcaagccatgctgaacgttgaggccaaagatgtcgatgctttgtcaaggaccagaacggttggagaagtggtcgatgccatgaaggctgagatagctggtggatcagcccctgctccggctgcagccgctcctgcaagtgccggtgctgcaccagctgtgaagattgattcagttcatggtgctgactgtgacgatttgtcactgatgcacgcaaaggtggttgacatcagaaggccagatgaactgattctggaaagaccggagaaccgtccagttcttgtcgttgacgatggctcagagttgacacttgctcttgtgagggtgttgggagcctgtgcagttgtcttgacctttgagggattgcagttggctcagagagctggtgcagctgccattcgtcatgttctggctaaggacctttcagcagaatcagctgagaaggccatcaaagaggctgagcaaagatttggagcgttgggaggcttcataagccagcaagcagaaaggtttgaaccagctgagatactgggtttcacactcatgtgtgcgaagtttgccaaagcctctctctgcactgctgtggctggaggtcgtcctgccttcatcggtgtggctaggcttgacggcagacttggattcacctctcaaggcacttctgacgcactcaagagagcacagcgtggagcgatctttggactctgcaagacaatagggttggagtggtcagaatctgatgtgttcagccgtggtgtggacattgctcaagggatgcacccagaagatgctgcagttgccatagttagggagatggcgtgtgctgacatcagaatcagagaggttgggattggagcaaaccagcaaagatgcacaatcagagctgccaagttggagactgggaaccctcagagacagatagcgaaagacgatgtgcttctggtttctggaggtgctcgtgggatcacacctctttgcatccgtgagatcacgcgtcagattgctggaggcaagtacattctgttgggtcgtagcaaagtttctgcgtctgaaccagcatggtgtgctggcatcactgatgagaaggctgtgcagaaagctgccacccaagagttgaagagggccttcagtgctggtgaaggacccaaacccactccaagggctgtcacgaaacttgtgggatctgttcttggtgctcgtgaagtgagaagctccattgctgccattgaagctctgggtggcaaagcgatctacagctcttgtgatgtgaactctgctgcagatgttgccaaagcagttagggatgcagagtcccagcttggtgccagagttagtggaatcgttcacgcttctggtgtgctccgtgatcgtctcatagagaagaaactccctgacgagtttgatgctgtctttgggaccaaagtcactgggttggagaatcttctggctgcagttgatcgtgccaacctcaaacacatggttctcttcagctcccttgctggtttccacggcaatgttggtcagtctgactatgcgatggcaaacgaagctctcaacaagatgggtttggaacttgcgaaggatgtcagtgtcaagtccatctgctttggtccctgggatggtgggatggtgacacctcaactcaagaaacagtttcaagaaatgggagttcagatcattcctcgtgaaggaggtgctgatacagttgcgaggattgtgttgggatcaagtcctgctgagatccttgttggaaactggaggacaccatccaagaaagttggaagtgacacgatcaccctgcatagaaagatcagtgccaagtccaatcccttcttggaggatcatgtcatacaaggcagaagggtgttgccaatgacccttgctattgggagccttgctgagacctgccttggactcttccctggctactctctctgggccatagatgacgcacagctcttcaaaggtgtcactgttgatggagacgtcaactgtgaagtgaccctcacaccgtccactgctccgagtgggagggtgaatgtccaagcgacgctcaagacgttctcaagtggaaaacttgttccagcctacagagctgtcatagtgttgtccaaccaaggtgctccacctgccaatgcaaccatgcagcctccgagccttgatgcagatcctgctttgcaagggtcagtctatgatggcaagactctctttcatggtcctgcgttcagaggcattgatgacgttctcagctgcaccaagagccagcttgttgccaagtgttctgctgttcctggatcagatgcagccagaggagagtttgcaactgacactgatgcacatgatccctttgtcaatgatcttgcctttcaagcaatgttggtctgggtgaggagaacgctgggacaagctgcactcccgaactccattcagaggatagtccaacacagaccggtcccacaagacaaacccttctacatcaccctcagatccaatcagagtggtggacatagccagcacaaacatgcacttcagttccacaacgaacaaggtgatctcttcattgatgttcaagcctctgtcattgcgacagactcacttgcgttctgagtagttagcttaatcacttaggtcaccagtatgaactaaaatgcatgtaggtgtaagagctcatggagagcatggaatattgtatccgaccatgtaacagtataataactgagctccatctcacttcttctatgaataaacaaaggatgttatgatatattaacactctatctatgcaccttattgttctatgataaatttcctcttattattataaatcatctgaatcgtgacggcttatggaatgcttcaaatagtacaaaaacaaatgtgtactataagactttctaaacaattctaactttagcattgtgaacgagacataagtgttaagaagacataacaattataatggaagaagtttgtctccatttatatattatatattacccacttatgtattatattaggatgttaaggagacataacaattataaagagagaagtttgtatccatttatatattatatactacccatttatatattatacttatccacttatttaatgtctttataaggtttgatccatgatatttctaatattttagttgatatgtatatgaaaaggtactatttgaactctcttactctgtataaaggttggatcatccttaaagtgggtctatttaattttattgcttcttacagataaaaaaaaaattatgagttggtttgataaaatattgaaggatttaaaataataataaataataaataacatataatatatgtatataaatttattataatataacatttatctataaaaaagtaaatattgtcataaatctatacaatcgtttagccttgctggaacgaatctcaattatttaaacgagagtaaacatatttgactttttggttatttaacaaattattatttaacactatatgaaattttttttttttatcagcaaagaataaaattaaattaagaaggacaatggtgtcccaatccttatacaaccaacttccacaagaaagtcaagtcagagacaacaaaaaaacaagcaaaggaaattttttaatttgagttgtcttgtttgctgcataatttatgcagtaaaacactacacataacccttttagcagtagagcaatggttgaccgtgtgcttagcttcttttattttatttttttatcagcaaagaataaataaaataaaatgagacacttcagggatgtttcaacccttatacaaaaccccaaaaacaagtttcctagcaccctaccaacgaattcgcggccgcttaattaagatgagtgatactcaggactcaggactcactctgctgatcactagtgctagcctcgaggtcgacacaactttgtatacaaaagttgtctagacctaggttaattaagcggccgcagcttatttctcttttcgatactctaattgagccgtgcgctctatctagaccaattagaattgatggagctctaaaggttgctggctgttttcttgttcatatgattaacttctaaacttgtgtataaatattctctgaaagtgcttcttttggcatatgtaggttgggcaaaaacgaggaagattgcttctcaatttggaagatgatgaacagccgaagaagaaaataagaataggcagtcctgctactcaatggatctcagtctataacggtcgtcgtcccatgaaacagaggtaacacattttttgcatatacactttgatagttcctcactaactgtgtaatcttttggtagatatcactacaatgttggagagacaaggctgcgccagcatatacagaagggaaatgaagatggccttttgattagctgtgtagcatcagcagctaatctctgggctctcatcatggatgctggaactggattcacttctcaagtttatgagttgtcaccggtcttcctacacaaggtaataatcagttgaagcaattaagaatcaatctgatttgtagtaaactaagaagaacttaccttatgatttccccgcaggactggattatggaacaatgggaaaagaactactatataagctccatagcgggttcagataacgggagctctttagttgttatgtcaaaaggttagtgtttagtgaataataaacttattatcaaaaagtcttcattgacttatttatatacttgttgtgaattggtaggaactacttattctcagcagtcatacaaagtgagtgactcatttccattcaagtggataaataagaaatggaaagaagattttcatgtaacctccatgacaactgctggtaatcgttggggtgtggtaatgtcgaggaactctggcttctctgatcaggtaggtttttgtctcttattgtctggtgtttttattttcccctgatagtctaatatgataaactctgcgttgtgaaaggtggtggagcttgactttttgtacccaagcgatgggatacataggaggtgggagaatgggtatagaataacatcaatggcagcaactgcggatcaagcagctttcatattaagcataccaaagcgtaagatggtggatgaaactcaagagactctccgcaccaccgcctttccaagtactcatgtcaaggttggtttctttagctttgaacacagatttggatctttttgttttgtttccatatacataggacctgagagcttttggttgaattttttttttttcaggacaaatgggcgaagaatctgtacattgcatcaatatgctatggcaggacagtgtgctgatgatacacacttaagcatcatgtgttgtgttagaaagccgaagacaattggagcgagcctcagggtcgtcataataccaatcaaagacgtaaaaccagacgcagtctctttggttgaatgtgatgaaagggatgtgtcttggtatgtatgtacgagtaacaaaagagaagatgcaattgagtagtagaaagatttgagagctttttaaagcccttcaagtgtgtgcttttatcttattgatatcatccatttgcgttgtttaatgcgtctttagatatgtttctgtttctttctcagtgtctgaatatctgataagtgcaatgtgagaaagccacaccaaaccaaaatattcaaatcttatatttttaataatgtcgaatcactcggagttgccaccttctgtgccaattgtgctgaatctatcacactaaaaaaaacatttcttcaaggtaatgacttgtggactatgttctgaattctcattaagtttttattttttgaagtttaagtttttaccttcttttttgaaaaatatcgttcataagatgtcacgccaggacatgagctacacatcacatattagcatgcagatgcggacgatttgtcactcacttcaaacacctaaaagagcttctctctcacagcacacacacatatgcatgcaatatttacacgtgatcgccatgcaaatctccattctcacctataaattagaggctcggcttcactttttactcaaaccaaaactcatcactacaagatccacaaccaaaaatggctgcaaggaacgtgagtgcggctcatgagatgcatgacgagaagaggatagctgttgtgggcatggctgttcagtatgctggatgcaaaacgaaagacgagttctgggaagttctcatgaatggaaaagttgagagcaaagtgatcagcgacaaacgtcttggttcaaattaccgtgctgaacactacaaagctgaaaggagcaagtatgctgacaccttctgcaatgagacatatggaactcttgatgagaacgaaatagacaatgagcatgaactccttttgaaccttgccaaacaagccttggctgaaacatctgtcaaagattcaacaagatgtggcatagtttctggatgcctcagcttcccgatggacaacctccaaggtgaactcttgaatgtgtaccagaaccatgttgagaagaaacttggtgccagagttttcaaagatgcctctcactggtcagaaagagaacagtccaacaaaccagaggctggtgacagaagaatcttcatggaccctgcttcctttgttgctgaggaactcaatcttggcgctctccactactctgttgatgctgcctgtgccactgcgctctatgtgctcagactggcgcaagatcacttggtctctggtgcagctgatgtgatgctttgtggtgcaacatgcctgccggagccgtttttcatactctctgggttctcaaccttccaagccatgcctgttggaacgggtcagaatgtgtccatgccgctgcacaaagattctcaaggattgacccctggtgaaggaggttccatcatggtcctcaaacgtttggatgacgcaatcagagatggagatcacatctatggaacacttttgggagccaatgtcagcaacagtggcactggtctgccacttaaaccccttttgccgtcagagaaaaagtgcctcatggacacctacacacgtatcaatgtgcatccccacaagattcagtatgttgaatgccatgcaactgggactccacaaggtgatcgtgtggaaattgatgctgtgaaggcttgctttgaaggcaaagtcccacgttttggaaccacaaaagggaactttggacacacattggtggcagctgggtttgctggcatgtgcaaagtgcttctctccatgaagcacgggatcattccacccactccgggaatagatgacgaaacgaagatggaccctctggttgtctctggtgaggccattccctggccagaaacgaatggagaaccgaagcgtgctggtctctcagcgtttggatttggtgggaccaatgctcatgctgtctttgaggaacatgacccaagcaatgctgcatgcactggccatgactccatttctgctctctctgcacgttgtggtggtgagtcaaacatgagaatagcaatcactgggatggatgccacttttggtgctttgaaaggattggatgcttttgaaagggccatctacactggtgctcatggtgctataccactcccagaaaagagatggagattcctggggaaagacaaggacttccttgatctttgtggagtcaaagcaacaccgcatggctgttacattgaagatgttgaagttgatttccagaggctgaggactccaatgactcctgaagatatgctcttgcctcaacagcttctggctgtcaccacaattgatagggccatattggactctggcatgaagaaaggtggaaatgtggctgtctttgtggggttggggaccgatcttgaactctaccgtcaccgtgcaagggttgctctcaaggagagagtgaggcctgaagccagcaagaaactcaatgacatgatgcagtacatcaatgattgtgggacaagcacttcttacaccagctacataggcaacttggttgcaacaagggtcagttcacaatggggcttcacgggaccttccttcacaatcacagaaggcaacaattctgtgtacagatgtgctgaacttggcaaatacctcttggaaacgggagaggttgatggggttgtggttgcgggtgttgatctctgtgggagtgctgagaacctttacgtcaagtcaaggcgtttcaaggtgtctacatctgacaccccgagagccagctttgatgcagctgctgatggttactttgttggagagggctgtggtgcatttgtgctcaagcgtgagacaagctgcaccaaggatgacagaatctatgcttgcatggatgccatagttcctggaaatgttccatctgcatgtttgagagaggcattggatcaagccagagtcaagcctggagacatcgagatgttggagctttctgctgattcagcgaggcatttgaaggacccgtctgttctcccaaaggaactcactgctgaggaagagattggcggacttcagacgattcttcgtgacgatgacaagctcccaaggaatgttgcaactggaagtgtcaaggccactgttggtgacactggttatgcttctggtgctgccagtttgattaaggctgcgctttgcatctacaaccgttacctgcccagcaatggagatgactgggatgaacctgcacctgaagcaccctgggacagcacactctttgcgtgccagacctcaagagcttggttgaagaaccctggtgagagacgttatgcggctgtttccggagtcagtgaaaccagaagttgctacagtgtgctgctttctgaagcagagggacactacgagagagagaacagaatcagtttggatgaggaagcacccaagctcattgtgttgagagcagactcccatgaagagattcttggaagattggacaagataagggaaaggttcttgcagcccacgggtgctgcacccagagagtctgaattgaaggcgcaagcccgtaggatctttcttgaactccttggtgagacccttgcccaagatgcagcttcatctggaagtcagaagccccttgctctcagcttggtctccactccatccaagctccagagagaggtggaacttgcggcaaaaggcattccgagatgtctcaagatgagacgtgattggagttcccctgctggaagcagatatgcgcctgagcctttggccagtgacagagttgccttcatgtatggagaaggaaggagcccttactatggcatcacacaagacattcataggatttggcctgaacttcatgaggtcatcaatgagaaaacaaaccgtctctgggctgaaggtgacagatgggtcatgccaagggccagcttcaagagtgagcttgagtcacaacagcaagagtttgacagaaacatgattgaaatgttccgtcttggaatcctcacctcaattgccttcacaaacctggcgagagatgttctcaacatcacgcccaaagcagcctttggactcagtttgggagagatttccatgatctttgctttctccaagaaaaacggtttgataagcgatcagttgacaaaggatttgagagagtcagatgtctggaacaaagctctggctgttgagttcaatgcgctcagagaagcctggggcattccacagtctgtcccaaaagatgagttctggcaaggttacatagtgaggggaacgaaacaagacatagaagcagccatagcaccagactcaaagtatgtgaggttgaccatcatcaatgatgccaacactgctctcatcagtggaaagcctgatgcatgcaaagctgcgattgctcgtcttggtggcaacatccctgcgcttccagtcactcaaggcatgtgtgggcattgcccagaggtgggaccttacaccaaggacatcgcaaagatccacgccaaccttgagttccctgtggttgatggtcttgatctctggactaccataaaccagaagaggcttgtgccaagagccacgggtgccaaagatgaatgggctccttcatcctttggggagtatgctggacagctctatgagaaacaagccaacttccctcagatagttgaaaccatctacaagcagaactatgatgtgtttgttgaagttgggccaaacaatcacagaagcacagcagtgagaaccacgcttggaccacagagaaaccaccttgctggtgccatagacaagcagaacgaggatgcttggacgacaatagtcaagctcgtggcttcattgaaggctcaccttgttcctggagtgaccatcagtccgctctaccactccaagctcgttgcagaggctgaggcttgttatgctgcgctctgtaaaggtgagaaacccaagaaaaacaagtttgtgagaaagattcagttgaatggcagattcaacagcaaggcagaccccatctcctcagcagaccttgcatccttcccacctgcggaccctgcgattgaagctgccatctcttcaaggatcatgaagcctgtggctccgaaattctatgcgcgtctcaacattgatgagcaagatgagaccagagatccgatcttgaacaaggacaatgcgccttccagctccagctcttccagcagttcctcttccagcagttcatctccgtctcctgctccttcagctccagttcagaagaaagctgccccagctgcggagacaaaagctgttgccagtgctgatgcacttcgtagtgccctgcttgatcttgactccatgcttgcgctcagctctgcaagtgcttctggcaaccttgttgagactgcgccatctgatgccagtgtcattgtccctccgtgcaacattgctgatcttggcagcagagctttcatgaaaacttatggtgtttctgcgcctctgtacaccggtgcaatggccaagggaattgcctctgcggacttggtgatcgcagctggaaggcaaggaatccttgcgtcatttggtgctggaggccttccaatgcaagttgtgcgtgagtccattgaaaagattcaagctgccctgcccaatggaccatatgctgtcaacctcatccattctccttttgacagcaaccttgagaagggaaatgttgatctcttcttggaaaagggtgtcacttttgttgaggcttcagccttcatgacgttgacaccgcaagttgtcagatacagagcggctgggttgacgaggaatgcagatgggtcagtcaacataaggaacagaatcattgggaaagtctccagaactgagctggctgaaatgttcatgcgtcctgcacctgagcatcttttgcagaagctcattgcttctggggagatcaatcaagaacaagctgagttggccagacgtgttcctgtggctgatgacattgcggttgaagctgattctggtggacacactgacaaccgtccaatccatgtcattctgcctctgattatcaacctgagggataggcttcacagagagtgtggatacccagcaaacctgagggttcgtgttggtgctgggggtggcattgggtgtccccaagctgcgctggcaactttcaacatgggtgcctctttcattgtcactggaacagtgaaccaagttgccaaacaatctgggacgtgtgacaatgtgaggaaacagcttgcgaaagcaacttactcagatgtttgcatggcaccggcagctgacatgtttgaggaaggtgtgaaacttcaagttttgaagaaaggaacaatgttcccttcaagagccaacaaactctatgagttgttctgcaagtatgattcttttgagtccatgcctccagcagagcttgcgagggttgagaaaagaatcttcagtcgtgcattggaagaggtctgggatgagaccaagaacttctacatcaaccgtctccacaacccagagaagatacagagggctgagagggaccccaaactgaagatgtcactgtgtttcagatggtatctgtccctggcttcaaggtgggccaacactggagcttctgacagagtcatggactaccaagtttggtgtggtcctgccattggttcattcaatgatttcatcaaaggaacttaccttgatccggcagtggcaaatgagtacccgtgtgttgtgcagatcaacaaacagattcttagaggagcgtgcttcttgaggcgtcttgaaatactgagaaatgcaaggctttcagatggtgcagctgcacttgtggcgagcattgatgacacatatgtccctgctgagaagctgtgagtagttagcttaatcacttaggtcaccattccaaacgaaatatcctcgagagtgtgtataccacggtgatatgagtgtggttgttgatgtatgttaacactacatagtcatggtgtgtgttccataaataatgtactaatgtaataagaactactccgtagacggtaataaaagagaagtttttttttttactcttgctactttcctataaagtgatgattaacaacagatacaccaaaaagaaaacaattaatctatattcacaatgaagcagtactagtctattgaacatgtcagattttctttttctagatgtctaatcaagccttcaaggctagtgataaaagatcatccaatgggatccaacaaagactcaaatctggttttgatcagatacttcgaaactatttttgtatgcactaaattatgcaagtgttcttttatttggtgaagactctttagaagcaaagaacgataagcagtaataaaaaaaataaagttcagttttaagatttgttattgacttagcggccgcttaattaaactagtgctagcctcgaggtcgaccaacttttctatacaaagttgtctagacctaggactaggcactgagtgactcactgacctgactgagtgactggcggccgcagcttatagtaaagatttttttgttaataaaatgaaagttaatatttatggatttatttgaacatatttacaagtttttgttaataaatttatttacagaagtgttaaatttgaaaatgtgttaaatgagagttaatatttatggatataatattactttatttaaaaataaaatgaatttatattaaaatatgatttggtaaaagatattataaagaggaacttggatgagaaagacgacgatgggcaaaagttgcatggcacaccgcttttgttcagtaacatctgcactgtggcgcctttttcacactcaccatgcatgctgccacgtcagctttcacactatgacaccactggccatacacgttgccacctcagctttctcctcttctcactatgacacgactggccatgcatgcatgcatgctgccacctcagctcccgcctcttcacccgtgtctttctctcatgtcgcagtgctgcgtgccaacctcttctctctataaatagagagaagagaatgatggttaaactcaaaccaaaacaagaaaacatacacaaatagcaaaacggatccacaaccaaaaatggcgcttcgtgtcaagaccaacaagaagccatgttgggagatgaccaaggaggaactgacctctggcaaaactgaggtgttcaactatgaggaactcctggagtttgcagagggtgacatagctaaggtttttggtccggagtttgctgtcatagacaagtaccccagaagggtgaggctgcctgctcgtgaatacctgcttgtgacaagggtcacactcatggatgccgaggtcaacaactacagagttggtgccagaatggtcactgagtatgatcttccagtgaatggcgaattgtctgagggaggtgattgtccctgggcagttctggttgagagtggacagtgcgatttgatgctgatatcatacatgggaattgatttccagaaccaaggtgacagagtttaccgtctgctcaacaccacgttgacattctatggggttgcccatgagggagagacccttgagtatgacatcagagtgaccggttttgccaaacgtttggatggtggcatctccatgttcttctttgagtatgactgctatgtcaatgggaggcttctcattgagatgagagatggctgtgctggcttcttcacaaatgaggagcttgatgcgggaaagggtgtggtgttcacaagaggggatttggctgccagagctaagattccaaagcaagatgtttctccctatgctgtcgctccctgccttcacaaaacaaaactcaacgaaaaggagatgcagaccttggttgacaaagattgggcttccgtttttggctcaaagaatggcatgccggagatcaactacaaactctgcgcacgtaagatgctcatgattgatagagtcaccagcattgaccataagggaggtgtgtacggtttgggtcagttggttggtgagaaaatcttggagagggaccattggtacttcccatgccattttgttaaggatcaagtcatggctggatctcttgtcagcgacggttgttcacaaatgctcaagatgtacatgatctggctcggtttgcaccttaccaccggaccatttgacttcagacccgtcaacggacacccgaacaaagttaggtgtaggggtcagatatctcctcataagggaaagttggtctacgtcatggagatcaaagagatgggattcgacgaggataacgatccgtacgccattgctgacgtcaacatcattgacgttgatttcgaaaagggtcaagatttcagccttgatagaatcagcgactacggaaagggggatcttaacaaaaagatcgtcgtggacttcaagggcattgctctcaagatgcagaagagatccacgaacaagaacccctccaaagttcagcccgtttttgctaacggtgcagccactgtgggaccggaagcgtccaaggccagctctggtgccagtgctagtgcttctgctgcccctgcgaagcctgctttctcagcagatgttcttgcgccaaagccagttgcacttcctgaacatatcctcaagggtgacgctctcgctccgaaagaaatgtcctggcatcccatgtcaaaacttcctggcaacccgacgccgttcttctcccctagttcttaccctccgagggcaatttgcttcatccctttccctggcaacccacttgacaacaattgcaaagctggagaaatgcctctgaactggtacaacatgtcagagttcatgtgtggaaaagttagcaactgcttgggaccagagttcgcaagatttgataagtcaaatacgagcagaagccctgcttttgatttggctcttgtgactagagttgttgaagtcacaaacatggaacatggcaagttcctgaatgttgattgcaatcccagcaaaggcacaatggtgggggagtttgactgtcctcaagatgcgtggttctttgatggttcttgcaatgatgggcacatgccttattccatcatcatggaaatcggacttcagacatccggtgttctcaccagtgtgttgaaagcaccactgacgatggacaaagatgacattctctttaggaaccttgatgcaagtgctgaaatggtgaggccagatgtggatgtgagggggaaaaccataaggaatgtgaccaagtgcactggatatgcaatgttgggaaagatggggattcacagattcacgtttgagttgtctgttgatggcgtggttttctacaaaggaagcacttcctttggatggttcactccagaggtgtttgctcagcaagctggacttgacaatgggaaaaagacggagccttggtgcaaaactaacaacacgagtgtgagaagagttgaaatcgcatcagccaaaggcaaagaacagctgactgagaaacttccagatgcaactaatgctcaagttctcagaaggtcagaacagtgtgagtatttggattacctcaacattgctcctgattctgggctgcatgggaaaggatatgcgcatggacacaaagatgttaacccacaagactggttcttctcttgtcacttttggtttgatcctgtgatgcctggatctttgggaattgagtcaatgttccagctcattgaggcatttgcggtggaccagaacataccgggagaatacaatgtgagcaatccgacctttgcccatgcccctggaaaaacggcgtggaagtaccgtggtcaattgacaccaaagaaccgtgcgatggactgtgaggtgcacatagtttcaatcacagcctctcctgaaaatggaggctacgttgacatagtggcagatggagcactttgggttgatggtctccgtgtgtatgaagccaaagaactcagagttcgtgttgtcagtgcaaaacctcaagccattccggatgttcaacaacagccacccagcgcaaaagcggaccctgggaaaactggagttgcactcagtccgactcagttgagagatgtcctgcttgaagtggacaatccattgtatcttggtgttgaaaactccaatttggtgcagtttgaatccaaacctgcaacttcttcaaggattgtcagtatcaaaccatgctccataagtgatcttggtgacaagtccttcatggaaacgtacaatgtgtcagcacctctgtacactggagcaatggccaagggaattgcgtctgcggaccttgtcattgctgctgggaagaggaagatattgggttcttttggagcgggtgggcttccaatgcaccatgtgagggcagctttggagaagatacaagcggctctgcctcaaggaccatatgctgtgaacctcattcattcaccttttgacagcaacttggaaaaggggaatgttgatctcttcctcgaaaagggcgttactgtggtggaggcttctgcattcatgaccctcactccccaagttgttcgttaccgtgcagccggactctcaaggaacgctgatgggagtgtcaacatcagaaaccgtatcattggaaaagtgtccagaacagaactcgccgaaatgttcatcagaccggctccggaacacctccttgagaaactcatagcttctggtgagataacacaagaacaagccgaacttgcccgtcgtgttcctgtcgcagacgacatcgctgttgaagctgattctggtggtcacactgacaaccgtcccatccacgtcatcttgcctttgatcatcaaccttaggaacagactgcacagagagtgtggttatcctgcgcaccttagagtcagagttggagctggaggcggtgttggctgcccacaagctgctgcggctgccctcacaatgggagctgccttcatagtgactgggactgtcaatcaagttgctaaacagtccgggacatgtgacaacgtgagaaaacaactcagtcaagccacctacagtgacatttgcatggctccagcagctgatatgtttgaggaaggtgtgaaactccaagttctcaagaagggaacaatgttcccatcaagagctaacaaattgtacgaactcttttgcaagtacgactctttcgattcaatgcctcctgctgaacttgaaaggatcgagaagaggatcttcaagagggcacttcaagaggtctgggaagagaccaaggacttttacatcaatggtttgaagaatccagagaagatacagagagcggaacatgaccccaaactcaagatgtctttgtgtttcagatggtatcttggtcttgcatcacgttgggccaacatgggtgctcctgatcgtgtcatggactatcaagtctggtgtggtccagccattggagccttcaatgacttcatcaaaggaacatatcttgatcctgctgtctctaatgagtacccatgtgttgtccagatcaaccttcagattttgcgtggtgcatgttacctgaggcgtcttaatgctctgagaaatgatccgaggattgatcttgagactgaagatgctgcctttgtctatgagccaacgaatgcgctttgagtagttagcttaatcacttaggtcacccagtccaagcccggcctagcacgatgatcatgagtgttgctattgatgtatgttaatactatacacagtcatcgtgtgtgttttataaaactgtaagcttaggatgtttgaggctaatgtaattagcactacaccgtaataaatgagaggtttactttatgttttaataatgttcttacccttgctgctctctaaactgtaatggcgtacggttagctaaactaaagtaaaaatcgattcgcttgagtaaaattagtgaccgggaaagatcatcgactactactgctcagagatgtaatcggtaattaagacttcaagctcaataattaattaggagtaaatctggcttcgaatttttaaattgtcaacttccaaagaaggattggcaagactcaatctcaattgcccaacaaacatatggctctttacaaatttggaatctctttttgatggcaagaacgtcgtaattcctctgtcgatctcatgtaattaccaaactcatctacttattactttctttatatgcacttactgatgcggccgcttaattaatcacgagtggatgactgtcacgactgactcatgactgactactagtgctagcctcgaggtcgacacaactttgtataataaagttgtctagacctaggagctgtgctgggtaactcacatgagtcactggtcacatcagcggccgcagcttatagtaaagatttttttgttaataaaatgaaagttaatatttatggatttatttgaacatatttacaagtttttgttaataaatttatttacagaagtgttaaatttgaaaatgtgttaaatgagagttaatatttatggatataatattactttatttaaaaataaaatgaatttatattaaaatatgatttggtaaaagatattataaagaggaacttggatgagaaagacgacgatgggcaaaagttgcatggcacaccgcttttgttcagtaacatctgcactgtggcgcctttttcacactcaccatgcatgctgccacgtcagctttcacactatgacaccactggccatacacgttgccacctcagctttctcctcttctcactatgacacgactggccatgcatgcatgcatgctgccacctcagctcccgcctcttcacccgtgtctttctctcatgtcgcagtgctgcgtgccaacctcttctctctataaatagagagaagagaatgatggttaaactcaaaccaaaacaagaaaacatacacaaatagcaaaacggatccacaaccaaaaatgcttcagcacacttggcttccgaagcctcccaatctgaccctcttgtcagatgaggttcatctctggaggattcctcttgaccagcctgagtcacaacttcaagaccttgctgccaccctgagcagtgatgaattggcgagggcaaacagattctactttccagaacacagaaggcgtttcactgctgggagaggcatcctcagatccatcttgggtggatacttgggagtggaaccgggtcaagtcaagtttgattatgagtcccgtgggaaaccgatccttggtgacagatttgctgagagtggactcctgttcaacttgtctcacagccagaaccttgccttgtgtgctgtcaactacacgcgtcaaataggcattgatcttgaatatctgcgtccaacatctgacttggagtctcttgcaaagaggttctttctcccaagagaatatgaactcttgaggtcactccctgatgagcagaaacagaagattttctttcgttactggacttgcaaagaggcttatctcaaagcaacgggagatggaatagccaaacttgaagagatcgagatagcactcaccccaacagaacctgccaagctccaaacagctcctgcgtggtctctgttggagcttgtgccagatgacaattgtgttgcagctgtggctgttgcgggttttggttggcagcccaagttctggcattactgagtagttagcttaatcacttaggtcacccagtccaagcccggcctagcacgatgatcatgagtgttgctattgatgtatgttaatactatacacagtcatcgtgtgtgttttataaaactgtaagcttaggatgtttgaggctaatgtaattagcactacaccgtaataaatgagaggtttactttatgttttaataatgttcttacccttgctgctctctaaactgtaatggcgtacggttagctaaactaaagtaaaaatcgattcgcttgagtaaaattagtgaccgggaaagatcatcgactactactgctcagagatgtaatcggtaattaagacttcaagctcaataattaattaggagtaaatctggcttcgaatttttaaattgtcaacttccaaagaaggattggcaagactcaatctcaattgcccaacaaacatatggctctttacaaatttggaatctctttttgatggcaagaacgtcgtaattcctctgtcgatctcatgtaattaccaaactcatctacttattactttctttatatgcacttactgatgcggccgcttaattaactactgtcactgaggccgtagacgagtacggactgatctaactagtgctagcctcgaggtcgacacccagctttcttgtacaaagtggttgcggccgcttaattaaatttaaattcaattaatgcaatcttgattttcaacaacgaaggtaatggcgtaaaagaaaaaatgtatgttattgtattgatctttcatgatgttgaagcgtgccataatatgatgatgtataattaaaatattaactgtcgcattttattgaaatggcactgttatttcaaccatatctttgattctgttacatgacacgactgcaagaagtaaataatagacgccgttgttaaagaattgctatcatatgtgcctaactagagggaatttgagcgtcagacctaatcaaatattacaaaatatctcactctgtcgccagcaatggtgtaatcagcgcagacaaatggcgtaaagatcgcggaaaaacctccccgagtggcatgatagctgcctctgtattgctgatttagtcagccttatttgacttaagggtgccctcgttagtgacaaattgctttcaaggagacagccatgccccacactttgttgaaaaacaaattgcctttggggagacggtaaagccagttgctcttcaataaggaatgtcgaggaggcaatgtaaccgcctctggtagtacacttctctaatccaaaaatcaatttgtattcaagataccgcaaaaaacttatggtttaaaccctgcaggactagtccagaaggtaattatccaagatgtagcatcaagaatccaatgtttacgggaaaaactatggaagtattatgtaagctcagcaagaagcagatcaatatgcggcacatatgcaacctatgttcaaaaatgaagaatgtacagatacaagatcctatactgccagaatacgaagaagaatacgtagaaattgaaaaagaagaaccaggcgaagaaaagaatcttgaagacgtaagcactgacgacaacaatgaaaagaagaagataaggtcggtgattgtgaaagagacatagaggacacatgtaaggtggaaaatgtaagggcggaaagtaaccttatcacaaaggaatcttatcccccactacttatccttttatatttttccgtgtcatttttgcccttgagttttcctatataaggaaccaagttcggcatttgtgaaaacaagaaaaaatttggtgtaagctattttctttgaagtactgaggatacaacttcagagaaatttgtaagtttgtaggtaccagatctggatcccaaaccatgtctccggagaggagaccagttgagattaggccagctacagcagctgatatggccgcggtttgtgatatcgttaaccattacattgagacgtctacagtgaactttaggacagagccacaaacaccacaagagtggattgatgatctagagaggttgcaagatagatacccttggttggttgctgaggttgagggtgttgtggctggtattgcttacgctgggccctggaaggctaggaacgcttacgattggacagttgagagtactgtttacgtgtcacataggcatcaaaggttgggcctaggatctacattgtacacacatttgcttaagtctatggaggcgcaaggttttaagtctgtggttgctgttataggccttccaaacgatccatctgttaggttgcatgaggctttgggatacacagcccggggtacattgcgcgcagctggatacaagcatggtggatggcatgatgttggtttttggcaaagggattttgagttgccagctcctccaaggccagttaggccagttacccaaatctgagtagttagcttaatcacctagagctcgatcggcggcaatagcttcttagcgccatcccgggttgatcctatctgtgttgaaatagttgcggtgggcaaggctctctttcagaaagacaggcggccaaaggaacccaaggtgaggtgggctatggctctcagttccttgtggaagcgcttggtctaaggtgcagaggtgttagcgggatgaagcaaaagtgtccgattgtaacaagatatgttgatcctacgtaaggatattaaagtatgtattcatcactaatataatcagtgtattccaatatgtactacgatttccaatgtctttattgtcgccgtatgtaatcggcgtcacaaaataatccccggtgactttcttttaatccaggatgaaataatatgttattataatttttgcgatttggtccgttataggaattgaagtgtgcttgaggtcggtcgccaccactcccatttcataattttacatgtatttgaaaaataaaaatttatggtattcaatttaaacacgtatacttgtaaagaatgatatcttgaaagaaatatagtttaaatatttattgataaaataacaagtcaggtattatagtccaagcaaaaacataaatttattgatgcaagtttaaattcagaaatatttcaataactgattatatcagctggtacattgccgtagatgaaagactgagtgcgatattatggtgtaatacataggaattcgtttaaacgatctgcgtctaattttcggtccaacttgcacaggaaagacgtcgaccgcggtagctcttgcccagcagactgggcttccagtcctttcgctcgatcgggtccaatgttgtcctcagctgtgaaccggaagcggacgaccaacagtggaagaactgaaaggaacgagccgtctataccttgatgatcggcctctggtgaagggtatcatcgcagccaagcaagctcatgaaaggctgatgggggaggtgtataattatgaggcccacggcgggcttattctttagggaggatctatctcgttgctcaagtgcatggcgcaaagcagttattggagtgcggattttcgttggcatattattcgccacgagttagcagacgaagagaccttcatgaacgtggccaaggccagagttaagcagatgttacgccctgctgcaggcctttctattatccaatagttggttgatctttggaaagagcctcggctgaggcccatactgaaagagatcgatggatatcgatatgccatgttgtttgctagccagaaccagatcacatccgatatgctattgcagcttgacgcagatatggaggataagttgattcatgggatcgctcaggagtagctcatccatgcacgccgacaagaacagaaattccgtcgagttaacgcagccgcttacgacggattcgaaggtcatccattcggaatgtattagtttgcaccagctccgcgtcacacctgtcttcatttgaataagatgttagcaattgtttttagctttgtcttgttgtggcagggcggcaagtgcttcagacatcattctgttttcaaattttatgctggagaacagcttcttaattcctttggaaataatagactgcgtcttaaaattcagatgtctggatatagatatgattgtaaaataacctatttaagtgtcatttagaacataagttttatgaatgttcttccattttcgtcatcgaacgaataagagtaaatacaccttttttaacattacaaataagttcttatacgttgtttatacaccgggaatcatttccattattttcgcgcaaaagtcacggatattcgtgaaagcgacataaactgcgaaatttgcggggagtgtcttgagtttgcctcgaggctagcgcatgcacatagacacacacatcatctcattgatgcttggtaataattgtcattagattgtttttatgcatagatgcactcgaaatcagccaattttagacaagtatcaaacggatgtgacttcagtacattaaaaacgtccgcaatgtgttattaagttgtctaagcgtcaatttgatttacaattgaatatatcctgccccagccagccaacagctcgatttacaattgaatatatcctgccggccggcccacgcgtgtcgaggaattctgatctggcccccatttggacgtgaatgtagacacgtcgaaataaagatttccgaattagaataatttgtttattgctttcgcctataaatacgacggatcgtaatttgtcgttttatcaaaatgtactttcattttataataacgctgcggacatctacatttttgaattgaaaaaaaattggtaattactctttctttttctccatattgaccatcatactcattgctgatccatgtagatttcccggacatgaagccatttacaattgaatatatcctgccgccgctgccgctttgcacccggtggagcttgcatgttggtttctacgcagaactgagccggttaggcagataatttccattgagaactgagccatgtgcaccttccccccaacacggtgagcgacggggcaacggagtgatccacatgggacttttaaacatcatccgtcggatggcgttgcgagagaagcagtcgatccgtgagatcagccgacgcaccgggcaggcgcgcaacacgatcgcaaagtatttgaacgcaggtacaatcgagccgacgttcacgcggaacgaccaagcaagcttggctgccatttttggggtgaggccgttcgcggccgaggggcgcagcccctggggggatgggaggcccgcgttagcgggccgggagggttcgagaagggggggcaccccccttcggcgtgcgcggtcacgcgcacagggcgcagccctggttaaaaacaaggtttataaatattggtttaaaagcaggttaaaagacaggttagcggtggccgaaaaacgggcggaaacccttgcaaatgctggattttctgcctgtggacagcccctcaaatgtcaataggtgcgcccctcatctgtcagcactctgcccctcaagtgtcaaggatcgcgcccctcatctgtcagtagtcgcgcccctcaagtgtcaataccgcagggcacttatccccaggcttgtccacatcatctgtgggaaactcgcgtaaaatcaggcgttttcgccgatttgcgaggctggccagctccacgtcgccggccgaaatcgagcctgcccctcatctgtcaacgccgcgccgggtgagtcggcccctcaagtgtcaacgtccgcccctcatctgtcagtgagggccaagttttccgcgaggtatccacaacgccggcggccgcggtgtctcgcacacggcttcgacggcgtttctggcgcgtttgcagggccatagacggccgccagcccagcggcgagggcaaccagcccggtgagcgtcggaaagggtcgacggatcttttccgctgcataaccctgcttcggggtcattatagcgattttttcggtatatccatcctttttcgcacgatatacaggattttgccaaagggttcgtgtagactttccttggtgtatccaacggcgtcagccgggcaggataggtgaagtaggcccacccgcgagcgggtgttccttcttcactgtcccttattcgcacctggcggtgctcaacgggaatcctgctctgcgaggctggccggctaccgccggcgtaacagatgagggcaagcggatggctgatgaaaccaagccaaccaggaagggcagcccacctatcaaggtgtactgccttccagacgaacgaagagcgattgaggaaaaggcggcggcggccggcatgagcctgtcggcctacctgctggccgtcggccagggctacaaaatcacgggcgtcgtggactatgagcacgtccgcgagctggcccgcatcaatggcgacctgggccgcctgggcggcctgctgaaactctggctcaccgacgacccgcgcacggcgcggttcggtgatgccacgatcctcgccctgctggcgaagatcgaagagaagcaggacgagcttggcaaggtcatgatgggcgtggtccgcccgagggcagagccatgacttttttagccgctaaaacggccggggggtgcgcgtgattgccaagcacgtccccatgcgctccatcaagaagagcgacttcgcggagctggtattcgtgcagggcaagattcggaataccaagtacgagaaggacggccagacggtctacgggaccgacttcattgccgataaggtggattatctggacaccaaggcaccaggcgggtcaaatcaggaataagggcacattgccccggcgtgagtcggggcaatcccgcaaggagggtgaatgaatcggacgtttgaccggaaggcatacaggcaagaactgatcgacgcggggttttccgccgaggatgccgaaaccatcgcaagccgcaccgtcatgcgtgcgccccgcgaaaccttccagtccgtcggctcgatggtccagcaagctacggccaagatcgagcgcgacagcgtgcaactggctccccctgccctgcccgcgccatcggccgccgtggagcgttcgcgtcgtctcgaacaggaggcggcaggtttggcgaagtcgatgaccatcgacacgcgaggaactatgacgaccaagaagcgaaaaaccgccggcgaggacctggcaaaacaggtcagcgaggccaagcaggccgcgttgctgaaacacacgaagcagcagatcaaggaaatgcagctttccttgttcgatattgcgccgtggccggacacgatgcgagcgatgccaaacgacacggcccgctctgccctgttcaccacgcgcaacaagaaaatcccgcgcgaggcgctgcaaaacaaggtcattttccacgtcaacaaggacgtgaagatcacctacaccggcgtcgagctgcgggccgacgatgacgaactggtgtggcagcaggtgttggagtacgcgaagcgcacccctatcggcgagccgatcaccttcacgttctacgagctttgccaggacctgggctggtcgatcaatggccggtattacacgaaggccgaggaatgcctgtcgcgcctacaggcgacggcgatgggcttcacgtccgaccgcgttgggcacctggaatcggtgtcgctgctgcaccgcttccgcgtcctggaccgtggcaagaaaacgtcccgttgccaggtcctgatcgacgaggaaatcgtcgtgctgtttgctggcgaccactacacgaaattcatatgggagaagtaccgcaagctgtcgccgacggcccgacggatgttcgactatttcagctcgcaccgggagccgtacccgctcaagctggaaaccttccgcctcatgtgcggatcggattccacccgcgtgaagaagtggcgcgagcaggtcggcgaagcctgcgaagagttgcgaggcagcggcctggtggaacacgcctgggtcaatgatgacctggtgcattgcaaacgctagggccttgtggggtcagttccggctgggggttcagcagccagcgctttactggcatttcaggaacaagcgggcactgctcgacgcacttgcttcgctcagtatcgctcgggacgcacggcgcgctctacgaactgccgataaacagaggattaaaattgacaattgtgattaaggctcagattcgacggcttggagcggccgacgtgcaggatttccgcgagatccgattgtcggccctgaagaaagctccagagatgttcgggtccgtttacgagcacgaggagaaaaagcccatggaggcgttcgctgaacggttgcgagatgccgtggcattcggcgcctacatcgacggcgagatcattgggctgtcggtcttcaaacaggaggacggccccaaggacgctcacaaggcgcatctgtccggcgttttcgtggagcccgaacagcgaggccgaggggtcgccggtatgctgctgcgggcgttgccggcgggtttattgctcgtgatgatcgtccgacagattccaacgggaatctggtggatgcgcatcttcatcctcggcgcacttaatatttcgctattctggagcttgttgtttatttcggtctaccgcctgccgggcggggtcgcggcgacggtaggcgctgtgcagccgctgatggtcgtgttcatctctgccgctctgctaggtagcccgatacgattgatggcggtcctgggggctatttgcggaactgcgggcgtggcgctgttggtgttgacaccaaacgcagcgctagatcctgtcggcgtcgcagcgggcctggcgggggcggtttccatggcgttcggaaccgtgctgacccgcaagtggcaacctcccgtgcctctgctcacctttaccgcctggcaactggcggccggaggacttctgctcgttccagtagctttagtgtttgatccgccaatcccgatgcctacaggaaccaatgttctcggcctggcgtggctcggcctgatcggagcgggtttaacctacttcctttggttccgggggatctcgcgactcgaacctacagttgtttccttactgggctttctcagcccccgagcgcttagtgggaatttgtaccccttatcgaaccgggagcacaggatgacgcctaacaattcattcaagccgacaccgcttcgcggcgcggcttaattcaggagttaaacatcatgagggaagcggtgatcgccgaagtatcgactcaactatcagaggtagttggcgtcatcgagcgccatctcgaaccgacgttgctggccgtacatttgtacggctccgcagtggatggcggcctgaagccacacagtgatattgatttgctggttacggtgaccgtaaggcttgatgaaacaacgcggcgagctttgatcaacgaccttttggaaacttcggcttcccctggagagagcgagattctccgcgctgtagaagtcaccattgttgtgcacgacgacatcattccgtggcgttatccagctaagcgcgaactgcaatttggagaatggcagcgcaatgacattcttgcaggtatcttcgagccagccacgatcgacattgatctggctatcttgctgacaaaagcaagagaacatagcgttgccttggtaggtccagcggcggaggaactctttgatccggttcctgaacaggatctatttgaggcgctaaatgaaaccttaacgctatggaactcgccgcccgactgggctggcgatgagcgaaatgtagtgcttacgttgtcccgcatttggtacagcgcagtaaccggcaaaatcgcgccgaaggatgtcgctgccgactgggcaatggagcgcctgccggcccagtatcagcccgtcatacttgaagctaggcaggcttatcttggacaagaagatcgcttggcctcgcgcgcagatcagttggaagaatttgttcactacgtgaaaggcgagatcaccaaggtagtcggcaaataatgtctaacaattcgttcaagccgacgccgcttcgcggcgcggcttaactcaagcgttagagagctggggaagactatgcgcgatctgttgaaggtggttctaagcctcgtcttgcgatggcatttcgatccattcccattccgcgctcaagatggcttcccctcggcagttcatcagggctaaatcaatctagccgacttgtccggtgaaatgggctgcactccaacagaaacaatcaaacaaacatacacagcgacttattcacacgagctcaaattacaacggtatatatcctgccagtcagcatcatcacaccaaaagttaggcccgaatagtttgaaattagaaagctcgcaattgaggtctacaggccaaattcgctcttagccgtacaatattactcaccggatcctaaccggtttaattaaggcgcgccatgcccgggcaagcggccgcacaagttt

SEQ ID NO: 62 - DNA, 34850 bp, Artificial sequence
  plasmid pDAB109509
gtacaaaaaagcaggcttctagacctaggtggagtcatcacgcagactatctcagcatgtgcgtagcacgcggccgcagcttatagtaaagatttttttgttaataaaatgaaagttaatatttatggatttatttgaacatatttacaagtttttgttaataaatttatttacagaagtgttaaatttgaaaatgtgttaaatgagagttaatatttatggatataatattactttatttaaaaataaaatgaatttatattaaaatatgatttggtaaaagatattataaagaggaacttggatgagaaagacgacgatgggcaaaagttgcatggcacaccgcttttgttcagtaacatctgcactgtggcgcctttttcacactcaccatgcatgctgccacgtcagctttcacactatgacaccactggccatacacgttgccacctcagctttctcctcttctcactatgacacgactggccatgcatgcatgcatgctgccacctcagctcccgcctcttcacccgtgtctttctctcatgtcgcagtgctgcgtgccaacctcttctctctataaatagagagaagagaatgatggttaaactcaaaccaaaacaagaaaacatacacaaatagcaaaacggatccacaaccaaaaatggcagcgaggctgcaagagcagaaaggaggtgagatggacacgaggattgcgatcataggcatgagcgccatacttccttgtggaaccacggtgagagagtcatgggagaccataagggctggcattgattgcctgtctgatcttcctgaggatcgtgttgatgtgactgcgtactttgacccagtcaagaccacaaaggacaaaatctactgcaagagaggaggtttcattcctgagtatgactttgatgcgcgtgagtttggtctcaacatgttccagatggaagattctgatgcgaatcagaccatctcacttctcaaggtcaaagaagcacttcaagatgctgggattgatgcacttggaaaggagaagaaaaacataggatgcgtgcttggcattggaggtggacagaagagttcacatgagttctacagcagactcaactatgtggttgtggagaaagtcttgagaaagatggggatgccagaggaagatgtcaaagtggctgtggagaagtacaaagcgaacttcccagaatggagacttgactctttccctggattccttgggaatgtcactgctggcagatgcaccaacacattcaacttggatggcatgaactgcgttgtggatgctgcatgtgcaagctccttgatagcagtcaaggttgcgattgatgaactgctctatggtgactgcgacatgatggtcactggtgcaacctgcacagacaactccattgggatgtacatggctttctcaaagacacctgtgttcagcacggacccaagtgtgagagcgtatgatgagaaaacgaaagggatgctcattggtgagggatcagccatgttggtgctcaaacgttatgcagatgcagtgagggatggtgatgagattcatgctgtgattcgtggttgtgcaagctcaagtgatggcaaagcagctggcatctacactcccacaatcagtggtcaagaggaagccttgagacgtgcatacaatcgtgcctgcgttgaccctgccactgtcactttggttgagggtcatgggactggcactccagttggagataggattgagttgactgcgttgaggaacttgtttgacaaagcgtatggtgaagggaacacagagaaagttgcagttggaagtatcaagtccagtattggtcatttgaaggctgttgctggtcttgctggaatgatcaaggtcatcatggctctcaaacacaagactttgcctggaacgatcaatgtggacaatccacccaatctctatgacaacactcccatcaatgagtcatccctctacatcaacacgatgaacagaccctggttccctccacctggtgttccgagacgtgctggaatatccagctttggctttggaggtgccaactaccatgcagtgttggaagaggctgaaccagagcacacgacagcgtacagactcaacaaacgtccacaaccggtgttgatgatggctgcaactcctgctgcgttgcagagcctttgtgaagctcagctgaaagagtttgaagctgcgatcaaggagaatgagacagtcaagaatactgcctacatcaagtgtgtcaagtttggagaacagttcaagttccctgggagcatacctgcgaccaatgcgagactgggattcttggtcaaagatgcggaggatgcgtgctccacgcttcgtgctatatgtgctcagtttgccaaagatgtgaccaaagaagcgtggaggcttccgagagaaggagtttctttccgtgccaaaggcattgccaccaatggtgctgttgctgcactcttctctggacaaggtgctcagtacacacacatgttcagtgaagttgcgatgaactggcctcagttcagacagtccattgctgcaatggacgctgcacagtccaaggttgctggaagtgacaaagactttgaaagagtctctcaagtcctgtacccaaggaaaccgtacgaacgtgagccagaacaagatcacaagaaaatctcactcacagcatacagccagccgtcaaccctggcatgtgctcttggtgcctttgagattttcaaggaagctggattcactccagactttgcagctggacacagcttgggtgagtttgctgcgctctatgcagctggttgtgttgacagagatgagttgtttgaacttgtttgcagaagggcaaggatcatgggaggcaaagatgcacctgccacacccaaaggttgcatggcagctgtcataggacccaacgcagagaacatcaaggttcaagctgccaacgtctggcttggaaactcaaactctccgtctcagactgtcattactgggtctgttgaagggattcaagctgaaagtgccagattgcagaaggaagggttcagagttgtgcctcttgcttgtgagtctgccttccattctccacagatggaaaatgccagctcagctttcaaagatgtcatatccaaggtttccttccgtacacccaaagcagaaacaaagctcttcagcaatgtttctggagagacctatccgacggatgccagagagatgctcactcaacacatgacctcatctgtgaagttcctgacccaagtgaggaacatgcaccaagctggtgcgagaatctttgttgagtttggaccgaaacaagttctcagcaaacttgtttctgaaaccctcaaagatgacccgtctgttgtcacagtgtctgtgaacccagcttctggcacggactctgacatacagttgagggatgctgcagttcagctggttgtggctggtgtcaatcttcaagggtttgacaagtgggatgctcctgatgccacgaggatgcaagccatcaagaaaaagagaaccacactcagactttcagctgccacctatgtcagtgacaagaccaagaaagtgagggatgctgccatgaacgacggaagatgtgtcacatacctcaagggtgctgcaccactcatcaaggctcctgaacctgtggttgacgaagctgccaagagggaggctgaaaggcttcagaaggagcttcaagacgctcagaggcagcttgacgacgccaaacgtgcagctgcagaagccaactccaaacttgctgctgccaaggaggaagccaagactgctgcagcttcagccaagcctgcagttgacactgctgttgtggagaaacatcgtgccatcctcaagtccatgctggctgagctggatggttatggaagtgttgatgcttcttcccttcagcaacagcaacagcaacagactgctccggcgcctgttaaagccgctgcccctgccgctcccgttgcaagtgctcctgctcccgccgtgtccaacgagttgcttgagaaagctgagacagttgtgatggaggttctcgctgccaagactggatacgaaacagacatgattgaggcggacatggagcttgagactgagttgggaattgacagcatcaagagggttgaaattctttctgaagtccaagctatgcttaacgttgaggcgaaagatgttgatgctctctctaggacgagaacagtgggtgaagttgtcaacgctatgaaggcagaaatcgctggttcttccgctccggcgccggcagctgccgcacctgcaccggctaaagcggctccagctgcagctgcaccagctgtttctaatgagctgctcgaaaaggcagaaactgttgtgatggaagtccttgctgccaaaactggctacgaaactgacatgatagaatcagacatggagcttgagacggagcttggaattgattccatcaagcgtgtggaaatcctcagtgaagtccaagccatgctcaatgtggaagctaaggatgtggatgctctctcaaggaccagaactgtcggtgaggttgtcaatgccatgaaggctgagatagctggaggctccgctcctgcgccggccgctgccgctcctggtcccgctgccgcggctccagctccagctgcagccgctccggccgtctcaaacgaactccttgaaaaagctgagaccgtcgtgatggaggtcttggcagctaaaaccggctatgagactgacatgattgagtctgacatggaattggagacagaacttgggatagacagcatcaaacgtgttgaaatcctcagtgaggtccaagctatgctgaacgtggaagcgaaggatgttgatgctctgtccagaacgaggaccgttggtgaggttgtggatgccatgaaggctgaaattgctggagggtctgcgcccgcgccagctgcagccgctcctgcacccgcagccgcggcacctgctccagctgcacctgcacctgccgtttcttcagaactcttggagaaggctgagacggttgtgatggaggttttggctgcaaagactggctatgagaccgacatgattgaatctgatatggaattggagacagagcttgggatcgattccatcaaaagagtggagatcctgagtgaagtccaagccatgctcaatgttgaagctaaggatgttgatgcactttcaagaacaaggacagtgggtgaggttgtggatgccatgaaggcggagattgctggagggagcgcgcctgcgccagctgccgcggcacctgcaccggcagccgcagctccagctccagctgcaccagcaccggccgcgcccgcgccagctgtttcatccgaactcctggaaaaggccgagacggttgtgatggaggtgctcgcagctaagactggttacgagaccgacatgattgaaagtgacatggagcttgaaaccgagttgggaatagatagcatcaaacgtgttgaaatcttgtctgaggtccaagctatgttgaacgtggaggcaaaagatgtcgatgcgctttcaagaaccagaacagtcggtgaggtcgtggacgccatgaaggctgaaattgccggaagctctgctagtgcgccagctgcagccgcacctgcacctgctgccgcggcacctgctccagctgcagccgctcctgccgtcagcaatgagttgctggagaaagccgaaacagttgtgatggaagtccttgctgcaaaaactggttacgaaacggacatgattgagtcagacatggaattggagaccgaacttggaatagattccatcaagagagtggagatcctctctgaggtgcaagccatgctcaacgttgaggctaaagatgttgatgcactcagtaggacaagaactgtgggggaagttgtcgatgcgatgaaggctgagattgctggaggctctgctcctgcgccggcagctgccgcacctgcacccgcagccgcggcaccagctgtcagcaacgaattgcttgagaaggctgaaacagttgtcatggaagtgctggctgcaaaaaccggctatgagactgacatgattgagtctgacatggaacttgagacggaattgggcattgacagcatcaagcgtgttgagatcctcagtgaagtccaagcaatgctcaatgtggaggctaaggatgtggatgccctctcaaggaccagaacagttggtgaggtcgttgatgcgatgaaggcggagatcgctggaagttccgcgcctgcgccagctgcagccgctcctgcacccgcagccgcggcaccggctccagctgcagccgcaccggccgtctcctcagaactcctggaaaaggctgagacagttgtgatggaagtccttgctgcgaaaactggctatgagaccgacatgattgaatctgacatggaactggagaccgagcttggaattgactccatcaaacgtgttgaaatcctctctgaggttcaagcgatgttgaatgtggaggccaaagatgttgatgctctttccagaacaaggacggtgggagaggtggttgatgccatgaaggctgagatagctgggggttctgctcctgcgccagctgcagccgctcctgctcccgctgccgcggcaccagctgtcagcaacgaactccttgaaaaagctgaaactgttgtgatggaggttttggctgcaaagactggatacgagactgacatgatagagtcagacatggagttggaaacagagcttgggattgatagcatcaagcgtgtggaaatcctttctgaggttcaagccatgctgaacgttgaggccaaagatgtcgatgctttgtcaaggaccagaacggttggagaagtggtcgatgccatgaaggctgagatagctggtggatcagcccctgctccggctgcagccgctcctgcaagtgccggtgctgcaccagctgtgaagattgattcagttcatggtgctgactgtgacgatttgtcactgatgcacgcaaaggtggttgacatcagaaggccagatgaactgattctggaaagaccggagaaccgtccagttcttgtcgttgacgatggctcagagttgacacttgctcttgtgagggtgttgggagcctgtgcagttgtcttgacctttgagggattgcagttggctcagagagctggtgcagctgccattcgtcatgttctggctaaggacctttcagcagaatcagctgagaaggccatcaaagaggctgagcaaagatttggagcgttgggaggcttcataagccagcaagcagaaaggtttgaaccagctgagatactgggtttcacactcatgtgtgcgaagtttgccaaagcctctctctgcactgctgtggctggaggtcgtcctgccttcatcggtgtggctaggcttgacggcagacttggattcacctctcaaggcacttctgacgcactcaagagagcacagcgtggagcgatctttggactctgcaagacaatagggttggagtggtcagaatctgatgtgttcagccgtggtgtggacattgctcaagggatgcacccagaagatgctgcagttgccatagttagggagatggcgtgtgctgacatcagaatcagagaggttgggattggagcaaaccagcaaagatgcacaatcagagctgccaagttggagactgggaaccctcagagacagatagcgaaagacgatgtgcttctggtttctggaggtgctcgtgggatcacacctctttgcatccgtgagatcacgcgtcagattgctggaggcaagtacattctgttgggtcgtagcaaagtttctgcgtctgaaccagcatggtgtgctggcatcactgatgagaaggctgtgcagaaagctgccacccaagagttgaagagggccttcagtgctggtgaaggacccaaacccactccaagggctgtcacgaaacttgtgggatctgttcttggtgctcgtgaagtgagaagctccattgctgccattgaagctctgggtggcaaagcgatctacagctcttgtgatgtgaactctgctgcagatgttgccaaagcagttagggatgcagagtcccagcttggtgccagagttagtggaatcgttcacgcttctggtgtgctccgtgatcgtctcatagagaagaaactccctgacgagtttgatgctgtctttgggaccaaagtcactgggttggagaatcttctggctgcagttgatcgtgccaacctcaaacacatggttctcttcagctcccttgctggtttccacggcaatgttggtcagtctgactatgcgatggcaaacgaagctctcaacaagatgggtttggaacttgcgaaggatgtcagtgtcaagtccatctgctttggtccctgggatggtgggatggtgacacctcaactcaagaaacagtttcaagaaatgggagttcagatcattcctcgtgaaggaggtgctgatacagttgcgaggattgtgttgggatcaagtcctgctgagatccttgttggaaactggaggacaccatccaagaaagttggaagtgacacgatcaccctgcatagaaagatcagtgccaagtccaatcccttcttggaggatcatgtcatacaaggcagaagggtgttgccaatgacccttgctattgggagccttgctgagacctgccttggactcttccctggctactctctctgggccatagatgacgcacagctcttcaaaggtgtcactgttgatggagacgtcaactgtgaagtgaccctcacaccgtccactgctccgagtgggagggtgaatgtccaagcgacgctcaagacgttctcaagtggaaaacttgttccagcctacagagctgtcatagtgttgtccaaccaaggtgctccacctgccaatgcaaccatgcagcctccgagccttgatgcagatcctgctttgcaagggtcagtctatgatggcaagactctctttcatggtcctgcgttcagaggcattgatgacgttctcagctgcaccaagagccagcttgttgccaagtgttctgctgttcctggatcagatgcagccagaggagagtttgcaactgacactgatgcacatgatccctttgtcaatgatcttgcctttcaagcaatgttggtctgggtgaggagaacgctgggacaagctgcactcccgaactccattcagaggatagtccaacacagaccggtcccacaagacaaacccttctacatcaccctcagatccaatcagagtggtggacatagccagcacaaacatgcacttcagttccacaacgaacaaggtgatctcttcattgatgttcaagcctctgtcattgcgacagactcacttgcgttctgagtagttagcttaatcacttaggtcacccagtccaagcccggcctagcacgatgatcatgagtgttgctattgatgtatgttaatactatacacagtcatcgtgtgtgttttataaaactgtaagcttaggatgtttgaggctaatgtaattagcactacaccgtaataaatgagaggtttactttatgttttaataatgttcttacccttgctgctctctaaactgtaatggcgtacggttagctaaactaaagtaaaaatcgattcgcttgagtaaaattagtgaccgggaaagatcatcgactactactgctcagagatgtaatcggtaattaagacttcaagctcaataattaattaggagtaaatctggcttcgaatttttaaattgtcaacttccaaagaaggattggcaagactcaatctcaattgcccaacaaacatatggctctttacaaatttggaatctctttttgatggcaagaacgtcgtaattcctctgtcgatctcatgtaattaccaaactcatctacttattactttctttatatgcacttactgatgcggccgcttaattaagatgagtgatactcaggactcaggactcactctgctgatcactagtgctagcctcgaggtcgacacaactttgtatacaaaagttgtctagacctaggctcagcaactcatccagtcaagttcgagtcagtgagttgggcggccgcagcttatagtaaagatttttttgttaataaaatgaaagttaatatttatggatttatttgaacatatttacaagtttttgttaataaatttatttacagaagtgttaaatttgaaaatgtgttaaatgagagttaatatttatggatataatattactttatttaaaaataaaatgaatttatattaaaatatgatttggtaaaagatattataaagaggaacttggatgagaaagacgacgatgggcaaaagttgcatggcacaccgcttttgttcagtaacatctgcactgtggcgcctttttcacactcaccatgcatgctgccacgtcagctttcacactatgacaccactggccatacacgttgccacctcagctttctcctcttctcactatgacacgactggccatgcatgcatgcatgctgccacctcagctcccgcctcttcacccgtgtctttctctcatgtcgcagtgctgcgtgccaacctcttctctctataaatagagagaagagaatgatggttaaactcaaaccaaaacaagaaaacatacacaaatagcaaaacggatccacaaccaaaaatggctgcaaggaacgtgagtgcggctcatgagatgcatgacgagaagaggatagctgttgtgggcatggctgttcagtatgctggatgcaaaacgaaagacgagttctgggaagttctcatgaatggaaaagttgagagcaaagtgatcagcgacaaacgtcttggttcaaattaccgtgctgaacactacaaagctgaaaggagcaagtatgctgacaccttctgcaatgagacatatggaactcttgatgagaacgaaatagacaatgagcatgaactccttttgaaccttgccaaacaagccttggctgaaacatctgtcaaagattcaacaagatgtggcatagtttctggatgcctcagcttcccgatggacaacctccaaggtgaactcttgaatgtgtaccagaaccatgttgagaagaaacttggtgccagagttttcaaagatgcctctcactggtcagaaagagaacagtccaacaaaccagaggctggtgacagaagaatcttcatggaccctgcttcctttgttgctgaggaactcaatcttggcgctctccactactctgttgatgctgcctgtgccactgcgctctatgtgctcagactggcgcaagatcacttggtctctggtgcagctgatgtgatgctttgtggtgcaacatgcctgccggagccgtttttcatactctctgggttctcaaccttccaagccatgcctgttggaacgggtcagaatgtgtccatgccgctgcacaaagattctcaaggattgacccctggtgaaggaggttccatcatggtcctcaaacgtttggatgacgcaatcagagatggagatcacatctatggaacacttttgggagccaatgtcagcaacagtggcactggtctgccacttaaaccccttttgccgtcagagaaaaagtgcctcatggacacctacacacgtatcaatgtgcatccccacaagattcagtatgttgaatgccatgcaactgggactccacaaggtgatcgtgtggaaattgatgctgtgaaggcttgctttgaaggcaaagtcccacgttttggaaccacaaaagggaactttggacacacattggtggcagctgggtttgctggcatgtgcaaagtgcttctctccatgaagcacgggatcattccacccactccgggaatagatgacgaaacgaagatggaccctctggttgtctctggtgaggccattccctggccagaaacgaatggagaaccgaagcgtgctggtctctcagcgtttggatttggtgggaccaatgctcatgctgtctttgaggaacatgacccaagcaatgctgcatgcactggccatgactccatttctgctctctctgcacgttgtggtggtgagtcaaacatgagaatagcaatcactgggatggatgccacttttggtgctttgaaaggattggatgcttttgaaagggccatctacactggtgctcatggtgctataccactcccagaaaagagatggagattcctggggaaagacaaggacttccttgatctttgtggagtcaaagcaacaccgcatggctgttacattgaagatgttgaagttgatttccagaggctgaggactccaatgactcctgaagatatgctcttgcctcaacagcttctggctgtcaccacaattgatagggccatattggactctggcatgaagaaaggtggaaatgtggctgtctttgtggggttggggaccgatcttgaactctaccgtcaccgtgcaagggttgctctcaaggagagagtgaggcctgaagccagcaagaaactcaatgacatgatgcagtacatcaatgattgtgggacaagcacttcttacaccagctacataggcaacttggttgcaacaagggtcagttcacaatggggcttcacgggaccttccttcacaatcacagaaggcaacaattctgtgtacagatgtgctgaacttggcaaatacctcttggaaacgggagaggttgatggggttgtggttgcgggtgttgatctctgtgggagtgctgagaacctttacgtcaagtcaaggcgtttcaaggtgtctacatctgacaccccgagagccagctttgatgcagctgctgatggttactttgttggagagggctgtggtgcatttgtgctcaagcgtgagacaagctgcaccaaggatgacagaatctatgcttgcatggatgccatagttcctggaaatgttccatctgcatgtttgagagaggcattggatcaagccagagtcaagcctggagacatcgagatgttggagctttctgctgattcagcgaggcatttgaaggacccgtctgttctcccaaaggaactcactgctgaggaagagattggcggacttcagacgattcttcgtgacgatgacaagctcccaaggaatgttgcaactggaagtgtcaaggccactgttggtgacactggttatgcttctggtgctgccagtttgattaaggctgcgctttgcatctacaaccgttacctgcccagcaatggagatgactgggatgaacctgcacctgaagcaccctgggacagcacactctttgcgtgccagacctcaagagcttggttgaagaaccctggtgagagacgttatgcggctgtttccggagtcagtgaaaccagaagttgctacagtgtgctgctttctgaagcagagggacactacgagagagagaacagaatcagtttggatgaggaagcacccaagctcattgtgttgagagcagactcccatgaagagattcttggaagattggacaagataagggaaaggttcttgcagcccacgggtgctgcacccagagagtctgaattgaaggcgcaagcccgtaggatctttcttgaactccttggtgagacccttgcccaagatgcagcttcatctggaagtcagaagccccttgctctcagcttggtctccactccatccaagctccagagagaggtggaacttgcggcaaaaggcattccgagatgtctcaagatgagacgtgattggagttcccctgctggaagcagatatgcgcctgagcctttggccagtgacagagttgccttcatgtatggagaaggaaggagcccttactatggcatcacacaagacattcataggatttggcctgaacttcatgaggtcatcaatgagaaaacaaaccgtctctgggctgaaggtgacagatgggtcatgccaagggccagcttcaagagtgagcttgagtcacaacagcaagagtttgacagaaacatgattgaaatgttccgtcttggaatcctcacctcaattgccttcacaaacctggcgagagatgttctcaacatcacgcccaaagcagcctttggactcagtttgggagagatttccatgatctttgctttctccaagaaaaacggtttgataagcgatcagttgacaaaggatttgagagagtcagatgtctggaacaaagctctggctgttgagttcaatgcgctcagagaagcctggggcattccacagtctgtcccaaaagatgagttctggcaaggttacatagtgaggggaacgaaacaagacatagaagcagccatagcaccagactcaaagtatgtgaggttgaccatcatcaatgatgccaacactgctctcatcagtggaaagcctgatgcatgcaaagctgcgattgctcgtcttggtggcaacatccctgcgcttccagtcactcaaggcatgtgtgggcattgcccagaggtgggaccttacaccaaggacatcgcaaagatccacgccaaccttgagttccctgtggttgatggtcttgatctctggactaccataaaccagaagaggcttgtgccaagagccacgggtgccaaagatgaatgggctccttcatcctttggggagtatgctggacagctctatgagaaacaagccaacttccctcagatagttgaaaccatctacaagcagaactatgatgtgtttgttgaagttgggccaaacaatcacagaagcacagcagtgagaaccacgcttggaccacagagaaaccaccttgctggtgccatagacaagcagaacgaggatgcttggacgacaatagtcaagctcgtggcttcattgaaggctcaccttgttcctggagtgaccatcagtccgctctaccactccaagctcgttgcagaggctgaggcttgttatgctgcgctctgtaaaggtgagaaacccaagaaaaacaagtttgtgagaaagattcagttgaatggcagattcaacagcaaggcagaccccatctcctcagcagaccttgcatccttcccacctgcggaccctgcgattgaagctgccatctcttcaaggatcatgaagcctgtggctccgaaattctatgcgcgtctcaacattgatgagcaagatgagaccagagatccgatcttgaacaaggacaatgcgccttccagctccagctcttccagcagttcctcttccagcagttcatctccgtctcctgctccttcagctccagttcagaagaaagctgccccagctgcggagacaaaagctgttgccagtgctgatgcacttcgtagtgccctgcttgatcttgactccatgcttgcgctcagctctgcaagtgcttctggcaaccttgttgagactgcgccatctgatgccagtgtcattgtccctccgtgcaacattgctgatcttggcagcagagctttcatgaaaacttatggtgtttctgcgcctctgtacaccggtgcaatggccaagggaattgcctctgcggacttggtgatcgcagctggaaggcaaggaatccttgcgtcatttggtgctggaggccttccaatgcaagttgtgcgtgagtccattgaaaagattcaagctgccctgcccaatggaccatatgctgtcaacctcatccattctccttttgacagcaaccttgagaagggaaatgttgatctcttcttggaaaagggtgtcacttttgttgaggcttcagccttcatgacgttgacaccgcaagttgtcagatacagagcggctgggttgacgaggaatgcagatgggtcagtcaacataaggaacagaatcattgggaaagtctccagaactgagctggctgaaatgttcatgcgtcctgcacctgagcatcttttgcagaagctcattgcttctggggagatcaatcaagaacaagctgagttggccagacgtgttcctgtggctgatgacattgcggttgaagctgattctggtggacacactgacaaccgtccaatccatgtcattctgcctctgattatcaacctgagggataggcttcacagagagtgtggatacccagcaaacctgagggttcgtgttggtgctgggggtggcattgggtgtccccaagctgcgctggcaactttcaacatgggtgcctctttcattgtcactggaacagtgaaccaagttgccaaacaatctgggacgtgtgacaatgtgaggaaacagcttgcgaaagcaacttactcagatgtttgcatggcaccggcagctgacatgtttgaggaaggtgtgaaacttcaagttttgaagaaaggaacaatgttcccttcaagagccaacaaactctatgagttgttctgcaagtatgattcttttgagtccatgcctccagcagagcttgcgagggttgagaaaagaatcttcagtcgtgcattggaagaggtctgggatgagaccaagaacttctacatcaaccgtctccacaacccagagaagatacagagggctgagagggaccccaaactgaagatgtcactgtgtttcagatggtatctgtccctggcttcaaggtgggccaacactggagcttctgacagagtcatggactaccaagtttggtgtggtcctgccattggttcattcaatgatttcatcaaaggaacttaccttgatccggcagtggcaaatgagtacccgtgtgttgtgcagatcaacaaacagattcttagaggagcgtgcttcttgaggcgtcttgaaatactgagaaatgcaaggctttcagatggtgcagctgcacttgtggcgagcattgatgacacatatgtccctgctgagaagctgtgagtagttagcttaatcacttaggtcacccagtccaagcccggcctagcacgatgatcatgagtgttgctattgatgtatgttaatactatacacagtcatcgtgtgtgttttataaaactgtaagcttaggatgtttgaggctaatgtaattagcactacaccgtaataaatgagaggtttactttatgttttaataatgttcttacccttgctgctctctaaactgtaatggcgtacggttagctaaactaaagtaaaaatcgattcgcttgagtaaaattagtgaccgggaaagatcatcgactactactgctcagagatgtaatcggtaattaagacttcaagctcaataattaattaggagtaaatctggcttcgaatttttaaattgtcaacttccaaagaaggattggcaagactcaatctcaattgcccaacaaacatatggctctttacaaatttggaatctctttttgatggcaagaacgtcgtaattcctctgtcgatctcatgtaattaccaaactcatctacttattactttctttatatgcacttactgatgcggccgcttaattaatctgacctgaccactagacctgagtgagtacagatgtgctactagtgctagcctcgaggtcgaccaacttttctatacaaagttgtctagacctaggactaggcactgagtgactcactgacctgactgagtgactggcggccgcagcttatagtaaagatttttttgttaataaaatgaaagttaatatttatggatttatttgaacatatttacaagtttttgttaataaatttatttacagaagtgttaaatttgaaaatgtgttaaatgagagttaatatttatggatataatattactttatttaaaaataaaatgaatttatattaaaatatgatttggtaaaagatattataaagaggaacttggatgagaaagacgacgatgggcaaaagttgcatggcacaccgcttttgttcagtaacatctgcactgtggcgcctttttcacactcaccatgcatgctgccacgtcagctttcacactatgacaccactggccatacacgttgccacctcagctttctcctcttctcactatgacacgactggccatgcatgcatgcatgctgccacctcagctcccgcctcttcacccgtgtctttctctcatgtcgcagtgctgcgtgccaacctcttctctctataaatagagagaagagaatgatggttaaactcaaaccaaaacaagaaaacatacacaaatagcaaaacggatccacaaccaaaaatggcgcttcgtgtcaagaccaacaagaagccatgttgggagatgaccaaggaggaactgacctctggcaaaactgaggtgttcaactatgaggaactcctggagtttgcagagggtgacatagctaaggtttttggtccggagtttgctgtcatagacaagtaccccagaagggtgaggctgcctgctcgtgaatacctgcttgtgacaagggtcacactcatggatgccgaggtcaacaactacagagttggtgccagaatggtcactgagtatgatcttccagtgaatggcgaattgtctgagggaggtgattgtccctgggcagttctggttgagagtggacagtgcgatttgatgctgatatcatacatgggaattgatttccagaaccaaggtgacagagtttaccgtctgctcaacaccacgttgacattctatggggttgcccatgagggagagacccttgagtatgacatcagagtgaccggttttgccaaacgtttggatggtggcatctccatgttcttctttgagtatgactgctatgtcaatgggaggcttctcattgagatgagagatggctgtgctggcttcttcacaaatgaggagcttgatgcgggaaagggtgtggtgttcacaagaggggatttggctgccagagctaagattccaaagcaagatgtttctccctatgctgtcgctccctgccttcacaaaacaaaactcaacgaaaaggagatgcagaccttggttgacaaagattgggcttccgtttttggctcaaagaatggcatgccggagatcaactacaaactctgcgcacgtaagatgctcatgattgatagagtcaccagcattgaccataagggaggtgtgtacggtttgggtcagttggttggtgagaaaatcttggagagggaccattggtacttcccatgccattttgttaaggatcaagtcatggctggatctcttgtcagcgacggttgttcacaaatgctcaagatgtacatgatctggctcggtttgcaccttaccaccggaccatttgacttcagacccgtcaacggacacccgaacaaagttaggtgtaggggtcagatatctcctcataagggaaagttggtctacgtcatggagatcaaagagatgggattcgacgaggataacgatccgtacgccattgctgacgtcaacatcattgacgttgatttcgaaaagggtcaagatttcagccttgatagaatcagcgactacggaaagggggatcttaacaaaaagatcgtcgtggacttcaagggcattgctctcaagatgcagaagagatccacgaacaagaacccctccaaagttcagcccgtttttgctaacggtgcagccactgtgggaccggaagcgtccaaggccagctctggtgccagtgctagtgcttctgctgcccctgcgaagcctgctttctcagcagatgttcttgcgccaaagccagttgcacttcctgaacatatcctcaagggtgacgctctcgctccgaaagaaatgtcctggcatcccatgtcaaaacttcctggcaacccgacgccgttcttctcccctagttcttaccctccgagggcaatttgcttcatccctttccctggcaacccacttgacaacaattgcaaagctggagaaatgcctctgaactggtacaacatgtcagagttcatgtgtggaaaagttagcaactgcttgggaccagagttcgcaagatttgataagtcaaatacgagcagaagccctgcttttgatttggctcttgtgactagagttgttgaagtcacaaacatggaacatggcaagttcctgaatgttgattgcaatcccagcaaaggcacaatggtgggggagtttgactgtcctcaagatgcgtggttctttgatggttcttgcaatgatgggcacatgccttattccatcatcatggaaatcggacttcagacatccggtgttctcaccagtgtgttgaaagcaccactgacgatggacaaagatgacattctctttaggaaccttgatgcaagtgctgaaatggtgaggccagatgtggatgtgagggggaaaaccataaggaatgtgaccaagtgcactggatatgcaatgttgggaaagatggggattcacagattcacgtttgagttgtctgttgatggcgtggttttctacaaaggaagcacttcctttggatggttcactccagaggtgtttgctcagcaagctggacttgacaatgggaaaaagacggagccttggtgcaaaactaacaacacgagtgtgagaagagttgaaatcgcatcagccaaaggcaaagaacagctgactgagaaacttccagatgcaactaatgctcaagttctcagaaggtcagaacagtgtgagtatttggattacctcaacattgctcctgattctgggctgcatgggaaaggatatgcgcatggacacaaagatgttaacccacaagactggttcttctcttgtcacttttggtttgatcctgtgatgcctggatctttgggaattgagtcaatgttccagctcattgaggcatttgcggtggaccagaacataccgggagaatacaatgtgagcaatccgacctttgcccatgcccctggaaaaacggcgtggaagtaccgtggtcaattgacaccaaagaaccgtgcgatggactgtgaggtgcacatagtttcaatcacagcctctcctgaaaatggaggctacgttgacatagtggcagatggagcactttgggttgatggtctccgtgtgtatgaagccaaagaactcagagttcgtgttgtcagtgcaaaacctcaagccattccggatgttcaacaacagccacccagcgcaaaagcggaccctgggaaaactggagttgcactcagtccgactcagttgagagatgtcctgcttgaagtggacaatccattgtatcttggtgttgaaaactccaatttggtgcagtttgaatccaaacctgcaacttcttcaaggattgtcagtatcaaaccatgctccataagtgatcttggtgacaagtccttcatggaaacgtacaatgtgtcagcacctctgtacactggagcaatggccaagggaattgcgtctgcggaccttgtcattgctgctgggaagaggaagatattgggttcttttggagcgggtgggcttccaatgcaccatgtgagggcagctttggagaagatacaagcggctctgcctcaaggaccatatgctgtgaacctcattcattcaccttttgacagcaacttggaaaaggggaatgttgatctcttcctcgaaaagggcgttactgtggtggaggcttctgcattcatgaccctcactccccaagttgttcgttaccgtgcagccggactctcaaggaacgctgatgggagtgtcaacatcagaaaccgtatcattggaaaagtgtccagaacagaactcgccgaaatgttcatcagaccggctccggaacacctccttgagaaactcatagcttctggtgagataacacaagaacaagccgaacttgcccgtcgtgttcctgtcgcagacgacatcgctgttgaagctgattctggtggtcacactgacaaccgtcccatccacgtcatcttgcctttgatcatcaaccttaggaacagactgcacagagagtgtggttatcctgcgcaccttagagtcagagttggagctggaggcggtgttggctgcccacaagctgctgcggctgccctcacaatgggagctgccttcatagtgactgggactgtcaatcaagttgctaaacagtccgggacatgtgacaacgtgagaaaacaactcagtcaagccacctacagtgacatttgcatggctccagcagctgatatgtttgaggaaggtgtgaaactccaagttctcaagaagggaacaatgttcccatcaagagctaacaaattgtacgaactcttttgcaagtacgactctttcgattcaatgcctcctgctgaacttgaaaggatcgagaagaggatcttcaagagggcacttcaagaggtctgggaagagaccaaggacttttacatcaatggtttgaagaatccagagaagatacagagagcggaacatgaccccaaactcaagatgtctttgtgtttcagatggtatcttggtcttgcatcacgttgggccaacatgggtgctcctgatcgtgtcatggactatcaagtctggtgtggtccagccattggagccttcaatgacttcatcaaaggaacatatcttgatcctgctgtctctaatgagtacccatgtgttgtccagatcaaccttcagattttgcgtggtgcatgttacctgaggcgtcttaatgctctgagaaatgatccgaggattgatcttgagactgaagatgctgcctttgtctatgagccaacgaatgcgctttgagtagttagcttaatcacttaggtcacccagtccaagcccggcctagcacgatgatcatgagtgttgctattgatgtatgttaatactatacacagtcatcgtgtgtgttttataaaactgtaagcttaggatgtttgaggctaatgtaattagcactacaccgtaataaatgagaggtttactttatgttttaataatgttcttacccttgctgctctctaaactgtaatggcgtacggttagctaaactaaagtaaaaatcgattcgcttgagtaaaattagtgaccgggaaagatcatcgactactactgctcagagatgtaatcggtaattaagacttcaagctcaataattaattaggagtaaatctggcttcgaatttttaaattgtcaacttccaaagaaggattggcaagactcaatctcaattgcccaacaaacatatggctctttacaaatttggaatctctttttgatggcaagaacgtcgtaattcctctgtcgatctcatgtaattaccaaactcatctacttattactttctttatatgcacttactgatgcggccgcttaattaatcacgagtggatgactgtcacgactgactcatgactgactactagtgctagcctcgaggtcgacacaactttgtataataaagttgtctagacctaggagctgtgctgggtaactcacatgagtcactggtcacatcagcggccgcagatctgattggtaagatatgggtactgtttggtttatatgttttgactattcagtcactatggcccccataaattttaattcggctggtatgtctcggttaagaccggtttgacatggttcatttcagttcaattatgttaatctggcacgtgatatgtttaccttcacacgaacattagtaatgatgggctaatttaagacttaacaggcctagagaggcccatcttattacgtaacggcgtcgtttagagtgcaccaagcttataaatgaaaacgagctacctcgggacatcacgctctttgtacactccgccatctctctctctcgttggagcagatctctctcgtgaatatcgacaatgcttcagcacacttggcttccgaagcctcccaatctgaccctcttgtcagatgaggttcatctctggaggattcctcttgaccagcctgagtcacaacttcaagaccttgctgccaccctgagcagtgatgaattggcgagggcaaacagattctactttccagaacacagaaggcgtttcactgctgggagaggcatcctcagatccatcttgggtggatacttgggagtggaaccgggtcaagtcaagtttgattatgagtcccgtgggaaaccgatccttggtgacagatttgctgagagtggactcctgttcaacttgtctcacagccagaaccttgccttgtgtgctgtcaactacacgcgtcaaataggcattgatcttgaatatctgcgtccaacatctgacttggagtctcttgcaaagaggttctttctcccaagagaatatgaactcttgaggtcactccctgatgagcagaaacagaagattttctttcgttactggacttgcaaagaggcttatctcaaagcaacgggagatggaatagccaaacttgaagagatcgagatagcactcaccccaacagaacctgccaagctccaaacagctcctgcgtggtctctgttggagcttgtgccagatgacaattgtgttgcagctgtggctgttgcgggttttggttggcagcccaagttctggcattactgagtagttagcttaatcacttaggtcaccctatcaaaatctatttagaaatacacaatattttgttgcaggcttgctggagaatcgatctgctatcataaaaattacaaaaaaattttatttgcctcaattattttaggattggtattaaggacgcttaaattatttgtcgggtcactacgcatcattgtgattgagaagatcagcgatacgaaatattcgtagtactatcgataatttatttgaaaattcataagaaaagcaaacgttacatgaattgatgaaacaatacaaagacagataaagccacgcacatttaggatattggccgagattactgaatattgagtaagatcacggaatttctgacaggagcatgtcttcaattcagcccaaatggcagttgaaatactcaaaccgccccatatgcaggagcggatcattcattgtttgtttggttgcctttgccaacatgggagtccaaggttgcggccgcttaattaactactgtcactgaggccgtagacgagtacggactgatctaactagtgctagcctcgaggtcgacacccagctttcttgtacaaagtggttgcggccgcttaattaaatttaaattcaattaatgcaatcttgattttcaacaacgaaggtaatggcgtaaaagaaaaaatgtatgttattgtattgatctttcatgatgttgaagcgtgccataatatgatgatgtataattaaaatattaactgtcgcattttattgaaatggcactgttatttcaaccatatctttgattctgttacatgacacgactgcaagaagtaaataatagacgccgttgttaaagaattgctatcatatgtgcctaactagagggaatttgagcgtcagacctaatcaaatattacaaaatatctcactctgtcgccagcaatggtgtaatcagcgcagacaaatggcgtaaagatcgcggaaaaacctccccgagtggcatgatagctgcctctgtattgctgatttagtcagccttatttgacttaagggtgccctcgttagtgacaaattgctttcaaggagacagccatgccccacactttgttgaaaaacaaattgcctttggggagacggtaaagccagttgctcttcaataaggaatgtcgaggaggcaatgtaaccgcctctggtagtacacttctctaatccaaaaatcaatttgtattcaagataccgcaaaaaacttatggtttaaaccctgcaggactagtccagaaggtaattatccaagatgtagcatcaagaatccaatgtttacgggaaaaactatggaagtattatgtaagctcagcaagaagcagatcaatatgcggcacatatgcaacctatgttcaaaaatgaagaatgtacagatacaagatcctatactgccagaatacgaagaagaatacgtagaaattgaaaaagaagaaccaggcgaagaaaagaatcttgaagacgtaagcactgacgacaacaatgaaaagaagaagataaggtcggtgattgtgaaagagacatagaggacacatgtaaggtggaaaatgtaagggcggaaagtaaccttatcacaaaggaatcttatcccccactacttatccttttatatttttccgtgtcatttttgcccttgagttttcctatataaggaaccaagttcggcatttgtgaaaacaagaaaaaatttggtgtaagctattttctttgaagtactgaggatacaacttcagagaaatttgtaagtttgtaggtaccagatctggatcccaaaccatgtctccggagaggagaccagttgagattaggccagctacagcagctgatatggccgcggtttgtgatatcgttaaccattacattgagacgtctacagtgaactttaggacagagccacaaacaccacaagagtggattgatgatctagagaggttgcaagatagatacccttggttggttgctgaggttgagggtgttgtggctggtattgcttacgctgggccctggaaggctaggaacgcttacgattggacagttgagagtactgtttacgtgtcacataggcatcaaaggttgggcctaggatctacattgtacacacatttgcttaagtctatggaggcgcaaggttttaagtctgtggttgctgttataggccttccaaacgatccatctgttaggttgcatgaggctttgggatacacagcccggggtacattgcgcgcagctggatacaagcatggtggatggcatgatgttggtttttggcaaagggattttgagttgccagctcctccaaggccagttaggccagttacccaaatctgagtagttagcttaatcacctagagctcgatcggcggcaatagcttcttagcgccatcccgggttgatcctatctgtgttgaaatagttgcggtgggcaaggctctctttcagaaagacaggcggccaaaggaacccaaggtgaggtgggctatggctctcagttccttgtggaagcgcttggtctaaggtgcagaggtgttagcgggatgaagcaaaagtgtccgattgtaacaagatatgttgatcctacgtaaggatattaaagtatgtattcatcactaatataatcagtgtattccaatatgtactacgatttccaatgtctttattgtcgccgtatgtaatcggcgtcacaaaataatccccggtgactttcttttaatccaggatgaaataatatgttattataatttttgcgatttggtccgttataggaattgaagtgtgcttgaggtcggtcgccaccactcccatttcataattttacatgtatttgaaaaataaaaatttatggtattcaatttaaacacgtatacttgtaaagaatgatatcttgaaagaaatatagtttaaatatttattgataaaataacaagtcaggtattatagtccaagcaaaaacataaatttattgatgcaagtttaaattcagaaatatttcaataactgattatatcagctggtacattgccgtagatgaaagactgagtgcgatattatggtgtaatacataggaattcgtttaaacgatctgcgtctaattttcggtccaacttgcacaggaaagacgtcgaccgcggtagctcttgcccagcagactgggcttccagtcctttcgctcgatcgggtccaatgttgtcctcagctgtgaaccggaagcggacgaccaacagtggaagaactgaaaggaacgagccgtctataccttgatgatcggcctctggtgaagggtatcatcgcagccaagcaagctcatgaaaggctgatgggggaggtgtataattatgaggcccacggcgggcttattctttagggaggatctatctcgttgctcaagtgcatggcgcaaagcagttattggagtgcggattttcgttggcatattattcgccacgagttagcagacgaagagaccttcatgaacgtggccaaggccagagttaagcagatgttacgccctgctgcaggcctttctattatccaatagttggttgatctttggaaagagcctcggctgaggcccatactgaaagagatcgatggatatcgatatgccatgttgtttgctagccagaaccagatcacatccgatatgctattgcagcttgacgcagatatggaggataagttgattcatgggatcgctcaggagtagctcatccatgcacgccgacaagaacagaaattccgtcgagttaacgcagccgcttacgacggattcgaaggtcatccattcggaatgtattagtttgcaccagctccgcgtcacacctgtcttcatttgaataagatgttagcaattgtttttagctttgtcttgttgtggcagggcggcaagtgcttcagacatcattctgttttcaaattttatgctggagaacagcttcttaattcctttggaaataatagactgcgtcttaaaattcagatgtctggatatagatatgattgtaaaataacctatttaagtgtcatttagaacataagttttatgaatgttcttccattttcgtcatcgaacgaataagagtaaatacaccttttttaacattacaaataagttcttatacgttgtttatacaccgggaatcatttccattattttcgcgcaaaagtcacggatattcgtgaaagcgacataaactgcgaaatttgcggggagtgtcttgagtttgcctcgaggctagcgcatgcacatagacacacacatcatctcattgatgcttggtaataattgtcattagattgtttttatgcatagatgcactcgaaatcagccaattttagacaagtatcaaacggatgtgacttcagtacattaaaaacgtccgcaatgtgttattaagttgtctaagcgtcaatttgatttacaattgaatatatcctgccccagccagccaacagctcgatttacaattgaatatatcctgccggccggcccacgcgtgtcgaggaattctgatctggcccccatttggacgtgaatgtagacacgtcgaaataaagatttccgaattagaataatttgtttattgctttcgcctataaatacgacggatcgtaatttgtcgttttatcaaaatgtactttcattttataataacgctgcggacatctacatttttgaattgaaaaaaaattggtaattactctttctttttctccatattgaccatcatactcattgctgatccatgtagatttcccggacatgaagccatttacaattgaatatatcctgccgccgctgccgctttgcacccggtggagcttgcatgttggtttctacgcagaactgagccggttaggcagataatttccattgagaactgagccatgtgcaccttccccccaacacggtgagcgacggggcaacggagtgatccacatgggacttttaaacatcatccgtcggatggcgttgcgagagaagcagtcgatccgtgagatcagccgacgcaccgggcaggcgcgcaacacgatcgcaaagtatttgaacgcaggtacaatcgagccgacgttcacgcggaacgaccaagcaagcttggctgccatttttggggtgaggccgttcgcggccgaggggcgcagcccctggggggatgggaggcccgcgttagcgggccgggagggttcgagaagggggggcaccccccttcggcgtgcgcggtcacgcgcacagggcgcagccctggttaaaaacaaggtttataaatattggtttaaaagcaggttaaaagacaggttagcggtggccgaaaaacgggcggaaacccttgcaaatgctggattttctgcctgtggacagcccctcaaatgtcaataggtgcgcccctcatctgtcagcactctgcccctcaagtgtcaaggatcgcgcccctcatctgtcagtagtcgcgcccctcaagtgtcaataccgcagggcacttatccccaggcttgtccacatcatctgtgggaaactcgcgtaaaatcaggcgttttcgccgatttgcgaggctggccagctccacgtcgccggccgaaatcgagcctgcccctcatctgtcaacgccgcgccgggtgagtcggcccctcaagtgtcaacgtccgcccctcatctgtcagtgagggccaagttttccgcgaggtatccacaacgccggcggccgcggtgtctcgcacacggcttcgacggcgtttctggcgcgtttgcagggccatagacggccgccagcccagcggcgagggcaaccagcccggtgagcgtcggaaagggtcgacggatcttttccgctgcataaccctgcttcggggtcattatagcgattttttcggtatatccatcctttttcgcacgatatacaggattttgccaaagggttcgtgtagactttccttggtgtatccaacggcgtcagccgggcaggataggtgaagtaggcccacccgcgagcgggtgttccttcttcactgtcccttattcgcacctggcggtgctcaacgggaatcctgctctgcgaggctggccggctaccgccggcgtaacagatgagggcaagcggatggctgatgaaaccaagccaaccaggaagggcagcccacctatcaaggtgtactgccttccagacgaacgaagagcgattgaggaaaaggcggcggcggccggcatgagcctgtcggcctacctgctggccgtcggccagggctacaaaatcacgggcgtcgtggactatgagcacgtccgcgagctggcccgcatcaatggcgacctgggccgcctgggcggcctgctgaaactctggctcaccgacgacccgcgcacggcgcggttcggtgatgccacgatcctcgccctgctggcgaagatcgaagagaagcaggacgagcttggcaaggtcatgatgggcgtggtccgcccgagggcagagccatgacttttttagccgctaaaacggccggggggtgcgcgtgattgccaagcacgtccccatgcgctccatcaagaagagcgacttcgcggagctggtattcgtgcagggcaagattcggaataccaagtacgagaaggacggccagacggtctacgggaccgacttcattgccgataaggtggattatctggacaccaaggcaccaggcgggtcaaatcaggaataagggcacattgccccggcgtgagtcggggcaatcccgcaaggagggtgaatgaatcggacgtttgaccggaaggcatacaggcaagaactgatcgacgcggggttttccgccgaggatgccgaaaccatcgcaagccgcaccgtcatgcgtgcgccccgcgaaaccttccagtccgtcggctcgatggtccagcaagctacggccaagatcgagcgcgacagcgtgcaactggctccccctgccctgcccgcgccatcggccgccgtggagcgttcgcgtcgtctcgaacaggaggcggcaggtttggcgaagtcgatgaccatcgacacgcgaggaactatgacgaccaagaagcgaaaaaccgccggcgaggacctggcaaaacaggtcagcgaggccaagcaggccgcgttgctgaaacacacgaagcagcagatcaaggaaatgcagctttccttgttcgatattgcgccgtggccggacacgatgcgagcgatgccaaacgacacggcccgctctgccctgttcaccacgcgcaacaagaaaatcccgcgcgaggcgctgcaaaacaaggtcattttccacgtcaacaaggacgtgaagatcacctacaccggcgtcgagctgcgggccgacgatgacgaactggtgtggcagcaggtgttggagtacgcgaagcgcacccctatcggcgagccgatcaccttcacgttctacgagctttgccaggacctgggctggtcgatcaatggccggtattacacgaaggccgaggaatgcctgtcgcgcctacaggcgacggcgatgggcttcacgtccgaccgcgttgggcacctggaatcggtgtcgctgctgcaccgcttccgcgtcctggaccgtggcaagaaaacgtcccgttgccaggtcctgatcgacgaggaaatcgtcgtgctgtttgctggcgaccactacacgaaattcatatgggagaagtaccgcaagctgtcgccgacggcccgacggatgttcgactatttcagctcgcaccgggagccgtacccgctcaagctggaaaccttccgcctcatgtgcggatcggattccacccgcgtgaagaagtggcgcgagcaggtcggcgaagcctgcgaagagttgcgaggcagcggcctggtggaacacgcctgggtcaatgatgacctggtgcattgcaaacgctagggccttgtggggtcagttccggctgggggttcagcagccagcgctttactggcatttcaggaacaagcgggcactgctcgacgcacttgcttcgctcagtatcgctcgggacgcacggcgcgctctacgaactgccgataaacagaggattaaaattgacaattgtgattaaggctcagattcgacggcttggagcggccgacgtgcaggatttccgcgagatccgattgtcggccctgaagaaagctccagagatgttcgggtccgtttacgagcacgaggagaaaaagcccatggaggcgttcgctgaacggttgcgagatgccgtggcattcggcgcctacatcgacggcgagatcattgggctgtcggtcttcaaacaggaggacggccccaaggacgctcacaaggcgcatctgtccggcgttttcgtggagcccgaacagcgaggccgaggggtcgccggtatgctgctgcgggcgttgccggcgggtttattgctcgtgatgatcgtccgacagattccaacgggaatctggtggatgcgcatcttcatcctcggcgcacttaatatttcgctattctggagcttgttgtttatttcggtctaccgcctgccgggcggggtcgcggcgacggtaggcgctgtgcagccgctgatggtcgtgttcatctctgccgctctgctaggtagcccgatacgattgatggcggtcctgggggctatttgcggaactgcgggcgtggcgctgttggtgttgacaccaaacgcagcgctagatcctgtcggcgtcgcagcgggcctggcgggggcggtttccatggcgttcggaaccgtgctgacccgcaagtggcaacctcccgtgcctctgctcacctttaccgcctggcaactggcggccggaggacttctgctcgttccagtagctttagtgtttgatccgccaatcccgatgcctacaggaaccaatgttctcggcctggcgtggctcggcctgatcggagcgggtttaacctacttcctttggttccgggggatctcgcgactcgaacctacagttgtttccttactgggctttctcagcccccgagcgcttagtgggaatttgtaccccttatcgaaccgggagcacaggatgacgcctaacaattcattcaagccgacaccgcttcgcggcgcggcttaattcaggagttaaacatcatgagggaagcggtgatcgccgaagtatcgactcaactatcagaggtagttggcgtcatcgagcgccatctcgaaccgacgttgctggccgtacatttgtacggctccgcagtggatggcggcctgaagccacacagtgatattgatttgctggttacggtgaccgtaaggcttgatgaaacaacgcggcgagctttgatcaacgaccttttggaaacttcggcttcccctggagagagcgagattctccgcgctgtagaagtcaccattgttgtgcacgacgacatcattccgtggcgttatccagctaagcgcgaactgcaatttggagaatggcagcgcaatgacattcttgcaggtatcttcgagccagccacgatcgacattgatctggctatcttgctgacaaaagcaagagaacatagcgttgccttggtaggtccagcggcggaggaactctttgatccggttcctgaacaggatctatttgaggcgctaaatgaaaccttaacgctatggaactcgccgcccgactgggctggcgatgagcgaaatgtagtgcttacgttgtcccgcatttggtacagcgcagtaaccggcaaaatcgcgccgaaggatgtcgctgccgactgggcaatggagcgcctgccggcccagtatcagcccgtcatacttgaagctaggcaggcttatcttggacaagaagatcgcttggcctcgcgcgcagatcagttggaagaatttgttcactacgtgaaaggcgagatcaccaaggtagtcggcaaataatgtctaacaattcgttcaagccgacgccgcttcgcggcgcggcttaactcaagcgttagagagctggggaagactatgcgcgatctgttgaaggtggttctaagcctcgtcttgcgatggcatttcgatccattcccattccgcgctcaagatggcttcccctcggcagttcatcagggctaaatcaatctagccgacttgtccggtgaaatgggctgcactccaacagaaacaatcaaacaaacatacacagcgacttattcacacgagctcaaattacaacggtatatatcctgccagtcagcatcatcacaccaaaagttaggcccgaatagtttgaaattagaaagctcgcaattgaggtctacaggccaaattcgctcttagccgtacaatattactcaccggatcctaaccggtttaattaaggcgcgccatgcccgggcaagcggccgcacaagttt

SEQ ID NO: 63 - DNA, 35154 bp, Artificial sequence
  plasmid pDAB9151
aattacaacggtatatatcctgccagtcagcatcatcacaccaaaagttaggcccgaatagtttgaaattagaaagctcgcaattgaggtctacaggccaaattcgctcttagccgtacaatattactcaccggatcctaaccggtttaattaaggcgcgccatgcccgggcaagcggccgcacaagtttgtacaaaaaagcaggcttctagacctaggactaggcactgagtgactcactgacctgactgagtgactggcggccgcagcttatagtaaagatttttttgttaataaaatgaaagttaatatttatggatttatttgaacatatttacaagtttttgttaataaatttatttacagaagtgttaaatttgaaaatgtgttaaatgagagttaatatttatggatataatattactttatttaaaaataaaatgaatttatattaaaatatgatttggtaaaagatattataaagaggaacttggatgagaaagacgacgatgggcaaaagttgcatggcacaccgcttttgttcagtaacatctgcactgtggcgcctttttcacactcaccatgcatgctgccacgtcagctttcacactatgacaccactggccatacacgttgccacctcagctttctcctcttctcactatgacacgactggccatgcatgcatgcatgctgccacctcagctcccgcctcttcacccgtgtctttctctcatgtcgcagtgctgcgtgccaacctcttctctctataaatagagagaagagaatgatggttaaactcaaaccaaaacaagaaaacatacacaaatagcaaaacggatccacaaccaaaaatggcgcttcgtgtcaagaccaacaagaagccatgttgggagatgaccaaggaggaactgacctctggcaaaactgaggtgttcaactatgaggaactcctggagtttgcagagggtgacatagctaaggtttttggtccggagtttgctgtcatagacaagtaccccagaagggtgaggctgcctgctcgtgaatacctgcttgtgacaagggtcacactcatggatgccgaggtcaacaactacagagttggtgccagaatggtcactgagtatgatcttccagtgaatggcgaattgtctgagggaggtgattgtccctgggcagttctggttgagagtggacagtgcgatttgatgctgatatcatacatgggaattgatttccagaaccaaggtgacagagtttaccgtctgctcaacaccacgttgacattctatggggttgcccatgagggagagacccttgagtatgacatcagagtgaccggttttgccaaacgtttggatggtggcatctccatgttcttctttgagtatgactgctatgtcaatgggaggcttctcattgagatgagagatggctgtgctggcttcttcacaaatgaggagcttgatgcgggaaagggtgtggtgttcacaagaggggatttggctgccagagctaagattccaaagcaagatgtttctccctatgctgtcgctccctgccttcacaaaacaaaactcaacgaaaaggagatgcagaccttggttgacaaagattgggcttccgtttttggctcaaagaatggcatgccggagatcaactacaaactctgcgcacgtaagatgctcatgattgatagagtcaccagcattgaccataagggaggtgtgtacggtttgggtcagttggttggtgagaaaatcttggagagggaccattggtacttcccatgccattttgttaaggatcaagtcatggctggatctcttgtcagcgacggttgttcacaaatgctcaagatgtacatgatctggctcggtttgcaccttaccaccggaccatttgacttcagacccgtcaacggacacccgaacaaagttaggtgtaggggtcagatatctcctcataagggaaagttggtctacgtcatggagatcaaagagatgggattcgacgaggataacgatccgtacgccattgctgacgtcaacatcattgacgttgatttcgaaaagggtcaagatttcagccttgatagaatcagcgactacggaaagggggatcttaacaaaaagatcgtcgtggacttcaagggcattgctctcaagatgcagaagagatccacgaacaagaacccctccaaagttcagcccgtttttgctaacggtgcagccactgtgggaccggaagcgtccaaggccagctctggtgccagtgctagtgcttctgctgcccctgcgaagcctgctttctcagcagatgttcttgcgccaaagccagttgcacttcctgaacatatcctcaagggtgacgctctcgctccgaaagaaatgtcctggcatcccatgtcaaaacttcctggcaacccgacgccgttcttctcccctagttcttaccctccgagggcaatttgcttcatccctttccctggcaacccacttgacaacaattgcaaagctggagaaatgcctctgaactggtacaacatgtcagagttcatgtgtggaaaagttagcaactgcttgggaccagagttcgcaagatttgataagtcaaatacgagcagaagccctgcttttgatttggctcttgtgactagagttgttgaagtcacaaacatggaacatggcaagttcctgaatgttgattgcaatcccagcaaaggcacaatggtgggggagtttgactgtcctcaagatgcgtggttctttgatggttcttgcaatgatgggcacatgccttattccatcatcatggaaatcggacttcagacatccggtgttctcaccagtgtgttgaaagcaccactgacgatggacaaagatgacattctctttaggaaccttgatgcaagtgctgaaatggtgaggccagatgtggatgtgagggggaaaaccataaggaatgtgaccaagtgcactggatatgcaatgttgggaaagatggggattcacagattcacgtttgagttgtctgttgatggcgtggttttctacaaaggaagcacttcctttggatggttcactccagaggtgtttgctcagcaagctggacttgacaatgggaaaaagacggagccttggtgcaaaactaacaacacgagtgtgagaagagttgaaatcgcatcagccaaaggcaaagaacagctgactgagaaacttccagatgcaactaatgctcaagttctcagaaggtcagaacagtgtgagtatttggattacctcaacattgctcctgattctgggctgcatgggaaaggatatgcgcatggacacaaagatgttaacccacaagactggttcttctcttgtcacttttggtttgatcctgtgatgcctggatctttgggaattgagtcaatgttccagctcattgaggcatttgcggtggaccagaacataccgggagaatacaatgtgagcaatccgacctttgcccatgcccctggaaaaacggcgtggaagtaccgtggtcaattgacaccaaagaaccgtgcgatggactgtgaggtgcacatagtttcaatcacagcctctcctgaaaatggaggctacgttgacatagtggcagatggagcactttgggttgatggtctccgtgtgtatgaagccaaagaactcagagttcgtgttgtcagtgcaaaacctcaagccattccggatgttcaacaacagccacccagcgcaaaagcggaccctgggaaaactggagttgcactcagtccgactcagttgagagatgtcctgcttgaagtggacaatccattgtatcttggtgttgaaaactccaatttggtgcagtttgaatccaaacctgcaacttcttcaaggattgtcagtatcaaaccatgctccataagtgatcttggtgacaagtccttcatggaaacgtacaatgtgtcagcacctctgtacactggagcaatggccaagggaattgcgtctgcggaccttgtcattgctgctgggaagaggaagatattgggttcttttggagcgggtgggcttccaatgcaccatgtgagggcagctttggagaagatacaagcggctctgcctcaaggaccatatgctgtgaacctcattcattcaccttttgacagcaacttggaaaaggggaatgttgatctcttcctcgaaaagggcgttactgtggtggaggcttctgcattcatgaccctcactccccaagttgttcgttaccgtgcagccggactctcaaggaacgctgatgggagtgtcaacatcagaaaccgtatcattggaaaagtgtccagaacagaactcgccgaaatgttcatcagaccggctccggaacacctccttgagaaactcatagcttctggtgagataacacaagaacaagccgaacttgcccgtcgtgttcctgtcgcagacgacatcgctgttgaagctgattctggtggtcacactgacaaccgtcccatccacgtcatcttgcctttgatcatcaaccttaggaacagactgcacagagagtgtggttatcctgcgcaccttagagtcagagttggagctggaggcggtgttggctgcccacaagctgctgcggctgccctcacaatgggagctgccttcatagtgactgggactgtcaatcaagttgctaaacagtccgggacatgtgacaacgtgagaaaacaactcagtcaagccacctacagtgacatttgcatggctccagcagctgatatgtttgaggaaggtgtgaaactccaagttctcaagaagggaacaatgttcccatcaagagctaacaaattgtacgaactcttttgcaagtacgactctttcgattcaatgcctcctgctgaacttgaaaggatcgagaagaggatcttcaagagggcacttcaagaggtctgggaagagaccaaggacttttacatcaatggtttgaagaatccagagaagatacagagagcggaacatgaccccaaactcaagatgtctttgtgtttcagatggtatcttggtcttgcatcacgttgggccaacatgggtgctcctgatcgtgtcatggactatcaagtctggtgtggtccagccattggagccttcaatgacttcatcaaaggaacatatcttgatcctgctgtctctaatgagtacccatgtgttgtccagatcaaccttcagattttgcgtggtgcatgttacctgaggcgtcttaatgctctgagaaatgatccgaggattgatcttgagactgaagatgctgcctttgtctatgagccaacgaatgcgctttgagtagttagcttaatcacttaggtcacccagtccaagcccggcctagcacgatgatcatgagtgttgctattgatgtatgttaatactatacacagtcatcgtgtgtgttttataaaactgtaagcttaggatgtttgaggctaatgtaattagcactacaccgtaataaatgagaggtttactttatgttttaataatgttcttacccttgctgctctctaaactgtaatggcgtacggttagctaaactaaagtaaaaatcgattcgcttgagtaaaattagtgaccgggaaagatcatcgactactactgctcagagatgtaatcggtaattaagacttcaagctcaataattaattaggagtaaatctggcttcgaatttttaaattgtcaacttccaaagaaggattggcaagactcaatctcaattgcccaacaaacatatggctctttacaaatttggaatctctttttgatggcaagaacgtcgtaattcctctgtcgatctcatgtaattaccaaactcatctacttattactttctttatatgcacttactgatgcggccgcttaattaatcacgagtggatgactgtcacgactgactcatgactgactactagtgctagcctcgaggtcgacacaactttgtatacaaaagttgtctagacctaggctcagcaactcatccagtcaagttcgagtcagtgagttgggcggccgcagcttatagtaaagatttttttgttaataaaatgaaagttaatatttatggatttatttgaacatatttacaagtttttgttaataaatttatttacagaagtgttaaatttgaaaatgtgttaaatgagagttaatatttatggatataatattactttatttaaaaataaaatgaatttatattaaaatatgatttggtaaaagatattataaagaggaacttggatgagaaagacgacgatgggcaaaagttgcatggcacaccgcttttgttcagtaacatctgcactgtggcgcctttttcacactcaccatgcatgctgccacgtcagctttcacactatgacaccactggccatacacgttgccacctcagctttctcctcttctcactatgacacgactggccatgcatgcatgcatgctgccacctcagctcccgcctcttcacccgtgtctttctctcatgtcgcagtgctgcgtgccaacctcttctctctataaatagagagaagagaatgatggttaaactcaaaccaaaacaagaaaacatacacaaatagcaaaacggatccacaaccaaaaatggctgcaaggaacgtgagtgcggctcatgagatgcatgacgagaagaggatagctgttgtgggcatggctgttcagtatgctggatgcaaaacgaaagacgagttctgggaagttctcatgaatggaaaagttgagagcaaagtgatcagcgacaaacgtcttggttcaaattaccgtgctgaacactacaaagctgaaaggagcaagtatgctgacaccttctgcaatgagacatatggaactcttgatgagaacgaaatagacaatgagcatgaactccttttgaaccttgccaaacaagccttggctgaaacatctgtcaaagattcaacaagatgtggcatagtttctggatgcctcagcttcccgatggacaacctccaaggtgaactcttgaatgtgtaccagaaccatgttgagaagaaacttggtgccagagttttcaaagatgcctctcactggtcagaaagagaacagtccaacaaaccagaggctggtgacagaagaatcttcatggaccctgcttcctttgttgctgaggaactcaatcttggcgctctccactactctgttgatgctgcctgtgccactgcgctctatgtgctcagactggcgcaagatcacttggtctctggtgcagctgatgtgatgctttgtggtgcaacatgcctgccggagccgtttttcatactctctgggttctcaaccttccaagccatgcctgttggaacgggtcagaatgtgtccatgccgctgcacaaagattctcaaggattgacccctggtgaaggaggttccatcatggtcctcaaacgtttggatgacgcaatcagagatggagatcacatctatggaacacttttgggagccaatgtcagcaacagtggcactggtctgccacttaaaccccttttgccgtcagagaaaaagtgcctcatggacacctacacacgtatcaatgtgcatccccacaagattcagtatgttgaatgccatgcaactgggactccacaaggtgatcgtgtggaaattgatgctgtgaaggcttgctttgaaggcaaagtcccacgttttggaaccacaaaagggaactttggacacacattggtggcagctgggtttgctggcatgtgcaaagtgcttctctccatgaagcacgggatcattccacccactccgggaatagatgacgaaacgaagatggaccctctggttgtctctggtgaggccattccctggccagaaacgaatggagaaccgaagcgtgctggtctctcagcgtttggatttggtgggaccaatgctcatgctgtctttgaggaacatgacccaagcaatgctgcatgcactggccatgactccatttctgctctctctgcacgttgtggtggtgagtcaaacatgagaatagcaatcactgggatggatgccacttttggtgctttgaaaggattggatgcttttgaaagggccatctacactggtgctcatggtgctataccactcccagaaaagagatggagattcctggggaaagacaaggacttccttgatctttgtggagtcaaagcaacaccgcatggctgttacattgaagatgttgaagttgatttccagaggctgaggactccaatgactcctgaagatatgctcttgcctcaacagcttctggctgtcaccacaattgatagggccatattggactctggcatgaagaaaggtggaaatgtggctgtctttgtggggttggggaccgatcttgaactctaccgtcaccgtgcaagggttgctctcaaggagagagtgaggcctgaagccagcaagaaactcaatgacatgatgcagtacatcaatgattgtgggacaagcacttcttacaccagctacataggcaacttggttgcaacaagggtcagttcacaatggggcttcacgggaccttccttcacaatcacagaaggcaacaattctgtgtacagatgtgctgaacttggcaaatacctcttggaaacgggagaggttgatggggttgtggttgcgggtgttgatctctgtgggagtgctgagaacctttacgtcaagtcaaggcgtttcaaggtgtctacatctgacaccccgagagccagctttgatgcagctgctgatggttactttgttggagagggctgtggtgcatttgtgctcaagcgtgagacaagctgcaccaaggatgacagaatctatgcttgcatggatgccatagttcctggaaatgttccatctgcatgtttgagagaggcattggatcaagccagagtcaagcctggagacatcgagatgttggagctttctgctgattcagcgaggcatttgaaggacccgtctgttctcccaaaggaactcactgctgaggaagagattggcggacttcagacgattcttcgtgacgatgacaagctcccaaggaatgttgcaactggaagtgtcaaggccactgttggtgacactggttatgcttctggtgctgccagtttgattaaggctgcgctttgcatctacaaccgttacctgcccagcaatggagatgactgggatgaacctgcacctgaagcaccctgggacagcacactctttgcgtgccagacctcaagagcttggttgaagaaccctggtgagagacgttatgcggctgtttccggagtcagtgaaaccagaagttgctacagtgtgctgctttctgaagcagagggacactacgagagagagaacagaatcagtttggatgaggaagcacccaagctcattgtgttgagagcagactcccatgaagagattcttggaagattggacaagataagggaaaggttcttgcagcccacgggtgctgcacccagagagtctgaattgaaggcgcaagcccgtaggatctttcttgaactccttggtgagacccttgcccaagatgcagcttcatctggaagtcagaagccccttgctctcagcttggtctccactccatccaagctccagagagaggtggaacttgcggcaaaaggcattccgagatgtctcaagatgagacgtgattggagttcccctgctggaagcagatatgcgcctgagcctttggccagtgacagagttgccttcatgtatggagaaggaaggagcccttactatggcatcacacaagacattcataggatttggcctgaacttcatgaggtcatcaatgagaaaacaaaccgtctctgggctgaaggtgacagatgggtcatgccaagggccagcttcaagagtgagcttgagtcacaacagcaagagtttgacagaaacatgattgaaatgttccgtcttggaatcctcacctcaattgccttcacaaacctggcgagagatgttctcaacatcacgcccaaagcagcctttggactcagtttgggagagatttccatgatctttgctttctccaagaaaaacggtttgataagcgatcagttgacaaaggatttgagagagtcagatgtctggaacaaagctctggctgttgagttcaatgcgctcagagaagcctggggcattccacagtctgtcccaaaagatgagttctggcaaggttacatagtgaggggaacgaaacaagacatagaagcagccatagcaccagactcaaagtatgtgaggttgaccatcatcaatgatgccaacactgctctcatcagtggaaagcctgatgcatgcaaagctgcgattgctcgtcttggtggcaacatccctgcgcttccagtcactcaaggcatgtgtgggcattgcccagaggtgggaccttacaccaaggacatcgcaaagatccacgccaaccttgagttccctgtggttgatggtcttgatctctggactaccataaaccagaagaggcttgtgccaagagccacgggtgccaaagatgaatgggctccttcatcctttggggagtatgctggacagctctatgagaaacaagccaacttccctcagatagttgaaaccatctacaagcagaactatgatgtgtttgttgaagttgggccaaacaatcacagaagcacagcagtgagaaccacgcttggaccacagagaaaccaccttgctggtgccatagacaagcagaacgaggatgcttggacgacaatagtcaagctcgtggcttcattgaaggctcaccttgttcctggagtgaccatcagtccgctctaccactccaagctcgttgcagaggctgaggcttgttatgctgcgctctgtaaaggtgagaaacccaagaaaaacaagtttgtgagaaagattcagttgaatggcagattcaacagcaaggcagaccccatctcctcagcagaccttgcatccttcccacctgcggaccctgcgattgaagctgccatctcttcaaggatcatgaagcctgtggctccgaaattctatgcgcgtctcaacattgatgagcaagatgagaccagagatccgatcttgaacaaggacaatgcgccttccagctccagctcttccagcagttcctcttccagcagttcatctccgtctcctgctccttcagctccagttcagaagaaagctgccccagctgcggagacaaaagctgttgccagtgctgatgcacttcgtagtgccctgcttgatcttgactccatgcttgcgctcagctctgcaagtgcttctggcaaccttgttgagactgcgccatctgatgccagtgtcattgtccctccgtgcaacattgctgatcttggcagcagagctttcatgaaaacttatggtgtttctgcgcctctgtacaccggtgcaatggccaagggaattgcctctgcggacttggtgatcgcagctggaaggcaaggaatccttgcgtcatttggtgctggaggccttccaatgcaagttgtgcgtgagtccattgaaaagattcaagctgccctgcccaatggaccatatgctgtcaacctcatccattctccttttgacagcaaccttgagaagggaaatgttgatctcttcttggaaaagggtgtcacttttgttgaggcttcagccttcatgacgttgacaccgcaagttgtcagatacagagcggctgggttgacgaggaatgcagatgggtcagtcaacataaggaacagaatcattgggaaagtctccagaactgagctggctgaaatgttcatgcgtcctgcacctgagcatcttttgcagaagctcattgcttctggggagatcaatcaagaacaagctgagttggccagacgtgttcctgtggctgatgacattgcggttgaagctgattctggtggacacactgacaaccgtccaatccatgtcattctgcctctgattatcaacctgagggataggcttcacagagagtgtggatacccagcaaacctgagggttcgtgttggtgctgggggtggcattgggtgtccccaagctgcgctggcaactttcaacatgggtgcctctttcattgtcactggaacagtgaaccaagttgccaaacaatctgggacgtgtgacaatgtgaggaaacagcttgcgaaagcaacttactcagatgtttgcatggcaccggcagctgacatgtttgaggaaggtgtgaaacttcaagttttgaagaaaggaacaatgttcccttcaagagccaacaaactctatgagttgttctgcaagtatgattcttttgagtccatgcctccagcagagcttgcgagggttgagaaaagaatcttcagtcgtgcattggaagaggtctgggatgagaccaagaacttctacatcaaccgtctccacaacccagagaagatacagagggctgagagggaccccaaactgaagatgtcactgtgtttcagatggtatctgtccctggcttcaaggtgggccaacactggagcttctgacagagtcatggactaccaagtttggtgtggtcctgccattggttcattcaatgatttcatcaaaggaacttaccttgatccggcagtggcaaatgagtacccgtgtgttgtgcagatcaacaaacagattcttagaggagcgtgcttcttgaggcgtcttgaaatactgagaaatgcaaggctttcagatggtgcagctgcacttgtggcgagcattgatgacacatatgtccctgctgagaagctgtgagtagttagcttaatcacttaggtcacccagtccaagcccggcctagcacgatgatcatgagtgttgctattgatgtatgttaatactatacacagtcatcgtgtgtgttttataaaactgtaagcttaggatgtttgaggctaatgtaattagcactacaccgtaataaatgagaggtttactttatgttttaataatgttcttacccttgctgctctctaaactgtaatggcgtacggttagctaaactaaagtaaaaatcgattcgcttgagtaaaattagtgaccgggaaagatcatcgactactactgctcagagatgtaatcggtaattaagacttcaagctcaataattaattaggagtaaatctggcttcgaatttttaaattgtcaacttccaaagaaggattggcaagactcaatctcaattgcccaacaaacatatggctctttacaaatttggaatctctttttgatggcaagaacgtcgtaattcctctgtcgatctcatgtaattaccaaactcatctacttattactttctttatatgcacttactgatgcggccgcttaattaatctgacctgaccactagacctgagtgagtacagatgtgctactagtgctagcctcgaggtcgaccaacttttctatacaaagttgtctagacctaggagctgtgctgggtaactcacatgagtcactggtcacatcagcggccgcagcttatagtaaagatttttttgttaataaaatgaaagttaatatttatggatttatttgaacatatttacaagtttttgttaataaatttatttacagaagtgttaaatttgaaaatgtgttaaatgagagttaatatttatggatataatattactttatttaaaaataaaatgaatttatattaaaatatgatttggtaaaagatattataaagaggaacttggatgagaaagacgacgatgggcaaaagttgcatggcacaccgcttttgttcagtaacatctgcactgtggcgcctttttcacactcaccatgcatgctgccacgtcagctttcacactatgacaccactggccatacacgttgccacctcagctttctcctcttctcactatgacacgactggccatgcatgcatgcatgctgccacctcagctcccgcctcttcacccgtgtctttctctcatgtcgcagtgctgcgtgccaacctcttctctctataaatagagagaagagaatgatggttaaactcaaaccaaaacaagaaaacatacacaaatagcaaaacggatccacaaccaaaaatgcttcagcacacttggcttccgaagcctcccaatctgaccctcttgtcagatgaggttcatctctggaggattcctcttgaccagcctgagtcacaacttcaagaccttgctgccaccctgagcagtgatgaattggcgagggcaaacagattctactttccagaacacagaaggcgtttcactgctgggagaggcatcctcagatccatcttgggtggatacttgggagtggaaccgggtcaagtcaagtttgattatgagtcccgtgggaaaccgatccttggtgacagatttgctgagagtggactcctgttcaacttgtctcacagccagaaccttgccttgtgtgctgtcaactacacgcgtcaaataggcattgatcttgaatatctgcgtccaacatctgacttggagtctcttgcaaagaggttctttctcccaagagaatatgaactcttgaggtcactccctgatgagcagaaacagaagattttctttcgttactggacttgcaaagaggcttatctcaaagcaacgggagatggaatagccaaacttgaagagatcgagatagcactcaccccaacagaacctgccaagctccaaacagctcctgcgtggtctctgttggagcttgtgccagatgacaattgtgttgcagctgtggctgttgcgggttttggttggcagcccaagttctggcattactgagtagttagcttaatcacttaggtcacccagtccaagcccggcctagcacgatgatcatgagtgttgctattgatgtatgttaatactatacacagtcatcgtgtgtgttttataaaactgtaagcttaggatgtttgaggctaatgtaattagcactacaccgtaataaatgagaggtttactttatgttttaataatgttcttacccttgctgctctctaaactgtaatggcgtacggttagctaaactaaagtaaaaatcgattcgcttgagtaaaattagtgaccgggaaagatcatcgactactactgctcagagatgtaatcggtaattaagacttcaagctcaataattaattaggagtaaatctggcttcgaatttttaaattgtcaacttccaaagaaggattggcaagactcaatctcaattgcccaacaaacatatggctctttacaaatttggaatctctttttgatggcaagaacgtcgtaattcctctgtcgatctcatgtaattaccaaactcatctacttattactttctttatatgcacttactgatgcggccgcttaattaactactgtcactgaggccgtagacgagtacggactgatctaactagtgctagcctcgaggtcgacacaactttgtataataaagttgtctagacctaggtggagtcatcacgcagactatctcagcatgtgcgtagcacgcggccgcagcttatagtaaagatttttttgttaataaaatgaaagttaatatttatggatttatttgaacatatttacaagtttttgttaataaatttatttacagaagtgttaaatttgaaaatgtgttaaatgagagttaatatttatggatataatattactttatttaaaaataaaatgaatttatattaaaatatgatttggtaaaagatattataaagaggaacttggatgagaaagacgacgatgggcaaaagttgcatggcacaccgcttttgttcagtaacatctgcactgtggcgcctttttcacactcaccatgcatgctgccacgtcagctttcacactatgacaccactggccatacacgttgccacctcagctttctcctcttctcactatgacacgactggccatgcatgcatgcatgctgccacctcagctcccgcctcttcacccgtgtctttctctcatgtcgcagtgctgcgtgccaacctcttctctctataaatagagagaagagaatgatggttaaactcaaaccaaaacaagaaaacatacacaaatagcaaaacggatccacaaccaaaaatggcagcgaggctgcaagagcagaaaggaggtgagatggacacgaggattgcgatcataggcatgagcgccatacttccttgtggaaccacggtgagagagtcatgggagaccataagggctggcattgattgcctgtctgatcttcctgaggatcgtgttgatgtgactgcgtactttgacccagtcaagaccacaaaggacaaaatctactgcaagagaggaggtttcattcctgagtatgactttgatgcgcgtgagtttggtctcaacatgttccagatggaagattctgatgcgaatcagaccatctcacttctcaaggtcaaagaagcacttcaagatgctgggattgatgcacttggaaaggagaagaaaaacataggatgcgtgcttggcattggaggtggacagaagagttcacatgagttctacagcagactcaactatgtggttgtggagaaagtcttgagaaagatggggatgccagaggaagatgtcaaagtggctgtggagaagtacaaagcgaacttcccagaatggagacttgactctttccctggattccttgggaatgtcactgctggcagatgcaccaacacattcaacttggatggcatgaactgcgttgtggatgctgcatgtgcaagctccttgatagcagtcaaggttgcgattgatgaactgctctatggtgactgcgacatgatggtcactggtgcaacctgcacagacaactccattgggatgtacatggctttctcaaagacacctgtgttcagcacggacccaagtgtgagagcgtatgatgagaaaacgaaagggatgctcattggtgagggatcagccatgttggtgctcaaacgttatgcagatgcagtgagggatggtgatgagattcatgctgtgattcgtggttgtgcaagctcaagtgatggcaaagcagctggcatctacactcccacaatcagtggtcaagaggaagccttgagacgtgcatacaatcgtgcctgcgttgaccctgccactgtcactttggttgagggtcatgggactggcactccagttggagataggattgagttgactgcgttgaggaacttgtttgacaaagcgtatggtgaagggaacacagagaaagttgcagttggaagtatcaagtccagtattggtcatttgaaggctgttgctggtcttgctggaatgatcaaggtcatcatggctctcaaacacaagactttgcctggaacgatcaatgtggacaatccacccaatctctatgacaacactcccatcaatgagtcatccctctacatcaacacgatgaacagaccctggttccctccacctggtgttccgagacgtgctggaatatccagctttggctttggaggtgccaactaccatgcagtgttggaagaggctgaaccagagcacacgacagcgtacagactcaacaaacgtccacaaccggtgttgatgatggctgcaactcctgctgcgttgcagagcctttgtgaagctcagctgaaagagtttgaagctgcgatcaaggagaatgagacagtcaagaatactgcctacatcaagtgtgtcaagtttggagaacagttcaagttccctgggagcatacctgcgaccaatgcgagactgggattcttggtcaaagatgcggaggatgcgtgctccacgcttcgtgctatatgtgctcagtttgccaaagatgtgaccaaagaagcgtggaggcttccgagagaaggagtttctttccgtgccaaaggcattgccaccaatggtgctgttgctgcactcttctctggacaaggtgctcagtacacacacatgttcagtgaagttgcgatgaactggcctcagttcagacagtccattgctgcaatggacgctgcacagtccaaggttgctggaagtgacaaagactttgaaagagtctctcaagtcctgtacccaaggaaaccgtacgaacgtgagccagaacaagatcacaagaaaatctcactcacagcatacagccagccgtcaaccctggcatgtgctcttggtgcctttgagattttcaaggaagctggattcactccagactttgcagctggacacagcttgggtgagtttgctgcgctctatgcagctggttgtgttgacagagatgagttgtttgaacttgtttgcagaagggcaaggatcatgggaggcaaagatgcacctgccacacccaaaggttgcatggcagctgtcataggacccaacgcagagaacatcaaggttcaagctgccaacgtctggcttggaaactcaaactctccgtctcagactgtcattactgggtctgttgaagggattcaagctgaaagtgccagattgcagaaggaagggttcagagttgtgcctcttgcttgtgagtctgccttccattctccacagatggaaaatgccagctcagctttcaaagatgtcatatccaaggtttccttccgtacacccaaagcagaaacaaagctcttcagcaatgtttctggagagacctatccgacggatgccagagagatgctcactcaacacatgacctcatctgtgaagttcctgacccaagtgaggaacatgcaccaagctggtgcgagaatctttgttgagtttggaccgaaacaagttctcagcaaacttgtttctgaaaccctcaaagatgacccgtctgttgtcacagtgtctgtgaacccagcttctggcacggactctgacatacagttgagggatgctgcagttcagctggttgtggctggtgtcaatcttcaagggtttgacaagtgggatgctcctgatgccacgaggatgcaagccatcaagaaaaagagaaccacactcagactttcagctgccacctatgtcagtgacaagaccaagaaagtgagggatgctgccatgaacgacggaagatgtgtcacatacctcaagggtgctgcaccactcatcaaggctcctgaacctgtggttgacgaagctgccaagagggaggctgaaaggcttcagaaggagcttcaagacgctcagaggcagcttgacgacgccaaacgtgcagctgcagaagccaactccaaacttgctgctgccaaggaggaagccaagactgctgcagcttcagccaagcctgcagttgacactgctgttgtggagaaacatcgtgccatcctcaagtccatgctggctgagctggatggttatggaagtgttgatgcttcttcccttcagcaacagcaacagcaacagactgctccggcgcctgttaaagccgctgcccctgccgctcccgttgcaagtgctcctgctcccgccgtgtccaacgagttgcttgagaaagctgagacagttgtgatggaggttctcgctgccaagactggatacgaaacagacatgattgaggcggacatggagcttgagactgagttgggaattgacagcatcaagagggttgaaattctttctgaagtccaagctatgcttaacgttgaggcgaaagatgttgatgctctctctaggacgagaacagtgggtgaagttgtcaacgctatgaaggcagaaatcgctggttcttccgctccggcgccggcagctgccgcacctgcaccggctaaagcggctccagctgcagctgcaccagctgtttctaatgagctgctcgaaaaggcagaaactgttgtgatggaagtccttgctgccaaaactggctacgaaactgacatgatagaatcagacatggagcttgagacggagcttggaattgattccatcaagcgtgtggaaatcctcagtgaagtccaagccatgctcaatgtggaagctaaggatgtggatgctctctcaaggaccagaactgtcggtgaggttgtcaatgccatgaaggctgagatagctggaggctccgctcctgcgccggccgctgccgctcctggtcccgctgccgcggctccagctccagctgcagccgctccggccgtctcaaacgaactccttgaaaaagctgagaccgtcgtgatggaggtcttggcagctaaaaccggctatgagactgacatgattgagtctgacatggaattggagacagaacttgggatagacagcatcaaacgtgttgaaatcctcagtgaggtccaagctatgctgaacgtggaagcgaaggatgttgatgctctgtccagaacgaggaccgttggtgaggttgtggatgccatgaaggctgaaattgctggagggtctgcgcccgcgccagctgcagccgctcctgcacccgcagccgcggcacctgctccagctgcacctgcacctgccgtttcttcagaactcttggagaaggctgagacggttgtgatggaggttttggctgcaaagactggctatgagaccgacatgattgaatctgatatggaattggagacagagcttgggatcgattccatcaaaagagtggagatcctgagtgaagtccaagccatgctcaatgttgaagctaaggatgttgatgcactttcaagaacaaggacagtgggtgaggttgtggatgccatgaaggcggagattgctggagggagcgcgcctgcgccagctgccgcggcacctgcaccggcagccgcagctccagctccagctgcaccagcaccggccgcgcccgcgccagctgtttcatccgaactcctggaaaaggccgagacggttgtgatggaggtgctcgcagctaagactggttacgagaccgacatgattgaaagtgacatggagcttgaaaccgagttgggaatagatagcatcaaacgtgttgaaatcttgtctgaggtccaagctatgttgaacgtggaggcaaaagatgtcgatgcgctttcaagaaccagaacagtcggtgaggtcgtggacgccatgaaggctgaaattgccggaagctctgctagtgcgccagctgcagccgcacctgcacctgctgccgcggcacctgctccagctgcagccgctcctgccgtcagcaatgagttgctggagaaagccgaaacagttgtgatggaagtccttgctgcaaaaactggttacgaaacggacatgattgagtcagacatggaattggagaccgaacttggaatagattccatcaagagagtggagatcctctctgaggtgcaagccatgctcaacgttgaggctaaagatgttgatgcactcagtaggacaagaactgtgggggaagttgtcgatgcgatgaaggctgagattgctggaggctctgctcctgcgccggcagctgccgcacctgcacccgcagccgcggcaccagctgtcagcaacgaattgcttgagaaggctgaaacagttgtcatggaagtgctggctgcaaaaaccggctatgagactgacatgattgagtctgacatggaacttgagacggaattgggcattgacagcatcaagcgtgttgagatcctcagtgaagtccaagcaatgctcaatgtggaggctaaggatgtggatgccctctcaaggaccagaacagttggtgaggtcgttgatgcgatgaaggcggagatcgctggaagttccgcgcctgcgccagctgcagccgctcctgcacccgcagccgcggcaccggctccagctgcagccgcaccggccgtctcctcagaactcctggaaaaggctgagacagttgtgatggaagtccttgctgcgaaaactggctatgagaccgacatgattgaatctgacatggaactggagaccgagcttggaattgactccatcaaacgtgttgaaatcctctctgaggttcaagcgatgttgaatgtggaggccaaagatgttgatgctctttccagaacaaggacggtgggagaggtggttgatgccatgaaggctgagatagctgggggttctgctcctgcgccagctgcagccgctcctgctcccgctgccgcggcaccagctgtcagcaacgaactccttgaaaaagctgaaactgttgtgatggaggttttggctgcaaagactggatacgagactgacatgatagagtcagacatggagttggaaacagagcttgggattgatagcatcaagcgtgtggaaatcctttctgaggttcaagccatgctgaacgttgaggccaaagatgtcgatgctttgtcaaggaccagaacggttggagaagtggtcgatgccatgaaggctgagatagctggtggatcagcccctgctccggctgcagccgctcctgcaagtgccggtgctgcaccagctgtgaagattgattcagttcatggtgctgactgtgacgatttgtcactgatgcacgcaaaggtggttgacatcagaaggccagatgaactgattctggaaagaccggagaaccgtccagttcttgtcgttgacgatggctcagagttgacacttgctcttgtgagggtgttgggagcctgtgcagttgtcttgacctttgagggattgcagttggctcagagagctggtgcagctgccattcgtcatgttctggctaaggacctttcagcagaatcagctgagaaggccatcaaagaggctgagcaaagatttggagcgttgggaggcttcataagccagcaagcagaaaggtttgaaccagctgagatactgggtttcacactcatgtgtgcgaagtttgccaaagcctctctctgcactgctgtggctggaggtcgtcctgccttcatcggtgtggctaggcttgacggcagacttggattcacctctcaaggcacttctgacgcactcaagagagcacagcgtggagcgatctttggactctgcaagacaatagggttggagtggtcagaatctgatgtgttcagccgtggtgtggacattgctcaagggatgcacccagaagatgctgcagttgccatagttagggagatggcgtgtgctgacatcagaatcagagaggttgggattggagcaaaccagcaaagatgcacaatcagagctgccaagttggagactgggaaccctcagagacagatagcgaaagacgatgtgcttctggtttctggaggtgctcgtgggatcacacctctttgcatccgtgagatcacgcgtcagattgctggaggcaagtacattctgttgggtcgtagcaaagtttctgcgtctgaaccagcatggtgtgctggcatcactgatgagaaggctgtgcagaaagctgccacccaagagttgaagagggccttcagtgctggtgaaggacccaaacccactccaagggctgtcacgaaacttgtgggatctgttcttggtgctcgtgaagtgagaagctccattgctgccattgaagctctgggtggcaaagcgatctacagctcttgtgatgtgaactctgctgcagatgttgccaaagcagttagggatgcagagtcccagcttggtgccagagttagtggaatcgttcacgcttctggtgtgctccgtgatcgtctcatagagaagaaactccctgacgagtttgatgctgtctttgggaccaaagtcactgggttggagaatcttctggctgcagttgatcgtgccaacctcaaacacatggttctcttcagctcccttgctggtttccacggcaatgttggtcagtctgactatgcgatggcaaacgaagctctcaacaagatgggtttggaacttgcgaaggatgtcagtgtcaagtccatctgctttggtccctgggatggtgggatggtgacacctcaactcaagaaacagtttcaagaaatgggagttcagatcattcctcgtgaaggaggtgctgatacagttgcgaggattgtgttgggatcaagtcctgctgagatccttgttggaaactggaggacaccatccaagaaagttggaagtgacacgatcaccctgcatagaaagatcagtgccaagtccaatcccttcttggaggatcatgtcatacaaggcagaagggtgttgccaatgacccttgctattgggagccttgctgagacctgccttggactcttccctggctactctctctgggccatagatgacgcacagctcttcaaaggtgtcactgttgatggagacgtcaactgtgaagtgaccctcacaccgtccactgctccgagtgggagggtgaatgtccaagcgacgctcaagacgttctcaagtggaaaacttgttccagcctacagagctgtcatagtgttgtccaaccaaggtgctccacctgccaatgcaaccatgcagcctccgagccttgatgcagatcctgctttgcaagggtcagtctatgatggcaagactctctttcatggtcctgcgttcagaggcattgatgacgttctcagctgcaccaagagccagcttgttgccaagtgttctgctgttcctggatcagatgcagccagaggagagtttgcaactgacactgatgcacatgatccctttgtcaatgatcttgcctttcaagcaatgttggtctgggtgaggagaacgctgggacaagctgcactcccgaactccattcagaggatagtccaacacagaccggtcccacaagacaaacccttctacatcaccctcagatccaatcagagtggtggacatagccagcacaaacatgcacttcagttccacaacgaacaaggtgatctcttcattgatgttcaagcctctgtcattgcgacagactcacttgcgttctgagtagttagcttaatcacttaggtcacccagtccaagcccggcctagcacgatgatcatgagtgttgctattgatgtatgttaatactatacacagtcatcgtgtgtgttttataaaactgtaagcttaggatgtttgaggctaatgtaattagcactacaccgtaataaatgagaggtttactttatgttttaataatgttcttacccttgctgctctctaaactgtaatggcgtacggttagctaaactaaagtaaaaatcgattcgcttgagtaaaattagtgaccgggaaagatcatcgactactactgctcagagatgtaatcggtaattaagacttcaagctcaataattaattaggagtaaatctggcttcgaatttttaaattgtcaacttccaaagaaggattggcaagactcaatctcaattgcccaacaaacatatggctctttacaaatttggaatctctttttgatggcaagaacgtcgtaattcctctgtcgatctcatgtaattaccaaactcatctacttattactttctttatatgcacttactgatgcggccgcttaattaagatgagtgatactcaggactcaggactcactctgctgatcactagtgctagcctcgaggtcgacacccagctttcttgtacaaagtggttgcggccgcttaattaaatttaaattcaattaatgcaatcttgattttcaacaacgaaggtaatggcgtaaaagaaaaaatgtatgttattgtattgatctttcatgatgttgaagcgtgccataatatgatgatgtataattaaaatattaactgtcgcattttattgaaatggcactgttatttcaaccatatctttgattctgttacatgacacgactgcaagaagtaaataatagacgccgttgttaaagaattgctatcatatgtgcctaactagagggaatttgagcgtcagacctaatcaaatattacaaaatatctcactctgtcgccagcaatggtgtaatcagcgcagacaaatggcgtaaagatcgcggaaaaacctccccgagtggcatgatagctgcctctgtattgctgatttagtcagccttatttgacttaagggtgccctcgttagtgacaaattgctttcaaggagacagccatgccccacactttgttgaaaaacaaattgcctttggggagacggtaaagccagttgctcttcaataaggaatgtcgaggaggcaatgtaaccgcctctggtagtacacttctctaatccaaaaatcaatttgtattcaagataccgcaaaaaacttatggtttaaaccctgcaggactagtccagaaggtaattatccaagatgtagcatcaagaatccaatgtttacgggaaaaactatggaagtattatgtaagctcagcaagaagcagatcaatatgcggcacatatgcaacctatgttcaaaaatgaagaatgtacagatacaagatcctatactgccagaatacgaagaagaatacgtagaaattgaaaaagaagaaccaggcgaagaaaagaatcttgaagacgtaagcactgacgacaacaatgaaaagaagaagataaggtcggtgattgtgaaagagacatagaggacacatgtaaggtggaaaatgtaagggcggaaagtaaccttatcacaaaggaatcttatcccccactacttatccttttatatttttccgtgtcatttttgcccttgagttttcctatataaggaaccaagttcggcatttgtgaaaacaagaaaaaatttggtgtaagctattttctttgaagtactgaggatacaacttcagagaaatttgtaagtttgtaggtaccagatctggatcccaaaccatgtctccggagaggagaccagttgagattaggccagctacagcagctgatatggccgcggtttgtgatatcgttaaccattacattgagacgtctacagtgaactttaggacagagccacaaacaccacaagagtggattgatgatctagagaggttgcaagatagatacccttggttggttgctgaggttgagggtgttgtggctggtattgcttacgctgggccctggaaggctaggaacgcttacgattggacagttgagagtactgtttacgtgtcacataggcatcaaaggttgggcctaggatctacattgtacacacatttgcttaagtctatggaggcgcaaggttttaagtctgtggttgctgttataggccttccaaacgatccatctgttaggttgcatgaggctttgggatacacagcccggggtacattgcgcgcagctggatacaagcatggtggatggcatgatgttggtttttggcaaagggattttgagttgccagctcctccaaggccagttaggccagttacccaaatctgagtagttagcttaatcacctagagctcgatcggcggcaatagcttcttagcgccatcccgggttgatcctatctgtgttgaaatagttgcggtgggcaaggctctctttcagaaagacaggcggccaaaggaacccaaggtgaggtgggctatggctctcagttccttgtggaagcgcttggtctaaggtgcagaggtgttagcgggatgaagcaaaagtgtccgattgtaacaagatatgttgatcctacgtaaggatattaaagtatgtattcatcactaatataatcagtgtattccaatatgtactacgatttccaatgtctttattgtcgccgtatgtaatcggcgtcacaaaataatccccggtgactttcttttaatccaggatgaaataatatgttattataatttttgcgatttggtccgttataggaattgaagtgtgcttgaggtcggtcgccaccactcccatttcataattttacatgtatttgaaaaataaaaatttatggtattcaatttaaacacgtatacttgtaaagaatgatatcttgaaagaaatatagtttaaatatttattgataaaataacaagtcaggtattatagtccaagcaaaaacataaatttattgatgcaagtttaaattcagaaatatttcaataactgattatatcagctggtacattgccgtagatgaaagactgagtgcgatattatggtgtaatacataggaattcgtttaaacgatctgcgtctaattttcggtccaacttgcacaggaaagacgtcgaccgcggtagctcttgcccagcagactgggcttccagtcctttcgctcgatcgggtccaatgttgtcctcagctgtgaaccggaagcggacgaccaacagtggaagaactgaaaggaacgagccgtctataccttgatgatcggcctctggtgaagggtatcatcgcagccaagcaagctcatgaaaggctgatgggggaggtgtataattatgaggcccacggcgggcttattctttagggaggatctatctcgttgctcaagtgcatggcgcaaagcagttattggagtgcggattttcgttggcatattattcgccacgagttagcagacgaagagaccttcatgaacgtggccaaggccagagttaagcagatgttacgccctgctgcaggcctttctattatccaatagttggttgatctttggaaagagcctcggctgaggcccatactgaaagagatcgatggatatcgatatgccatgttgtttgctagccagaaccagatcacatccgatatgctattgcagcttgacgcagatatggaggataagttgattcatgggatcgctcaggagtagctcatccatgcacgccgacaagaacagaaattccgtcgagttaacgcagccgcttacgacggattcgaaggtcatccattcggaatgtattagtttgcaccagctccgcgtcacacctgtcttcatttgaataagatgttagcaattgtttttagctttgtcttgttgtggcagggcggcaagtgcttcagacatcattctgttttcaaattttatgctggagaacagcttcttaattcctttggaaataatagactgcgtcttaaaattcagatgtctggatatagatatgattgtaaaataacctatttaagtgtcatttagaacataagttttatgaatgttcttccattttcgtcatcgaacgaataagagtaaatacaccttttttaacattacaaataagttcttatacgttgtttatacaccgggaatcatttccattattttcgcgcaaaagtcacggatattcgtgaaagcgacataaactgcgaaatttgcggggagtgtcttgagtttgcctcgaggctagcgcatgcacatagacacacacatcatctcattgatgcttggtaataattgtcattagattgtttttatgcatagatgcactcgaaatcagccaattttagacaagtatcaaacggatgtgacttcagtacattaaaaacgtccgcaatgtgttattaagttgtctaagcgtcaatttgatttacaattgaatatatcctgccccagccagccaacagctcgatttacaattgaatatatcctgccggccggcccacgcgtgtcgaggaattctgatctggcccccatttggacgtgaatgtagacacgtcgaaataaagatttccgaattagaataatttgtttattgctttcgcctataaatacgacggatcgtaatttgtcgttttatcaaaatgtactttcattttataataacgctgcggacatctacatttttgaattgaaaaaaaattggtaattactctttctttttctccatattgaccatcatactcattgctgatccatgtagatttcccggacatgaagccatttacaattgaatatatcctgccgccgctgccgctttgcacccggtggagcttgcatgttggtttctacgcagaactgagccggttaggcagataatttccattgagaactgagccatgtgcaccttccccccaacacggtgagcgacggggcaacggagtgatccacatgggacttttaaacatcatccgtcggatggcgttgcgagagaagcagtcgatccgtgagatcagccgacgcaccgggcaggcgcgcaacacgatcgcaaagtatttgaacgcaggtacaatcgagccgacgttcacgcggaacgaccaagcaagcttggctgccatttttggggtgaggccgttcgcggccgaggggcgcagcccctggggggatgggaggcccgcgttagcgggccgggagggttcgagaagggggggcaccccccttcggcgtgcgcggtcacgcgcacagggcgcagccctggttaaaaacaaggtttataaatattggtttaaaagcaggttaaaagacaggttagcggtggccgaaaaacgggcggaaacccttgcaaatgctggattttctgcctgtggacagcccctcaaatgtcaataggtgcgcccctcatctgtcagcactctgcccctcaagtgtcaaggatcgcgcccctcatctgtcagtagtcgcgcccctcaagtgtcaataccgcagggcacttatccccaggcttgtccacatcatctgtgggaaactcgcgtaaaatcaggcgttttcgccgatttgcgaggctggccagctccacgtcgccggccgaaatcgagcctgcccctcatctgtcaacgccgcgccgggtgagtcggcccctcaagtgtcaacgtccgcccctcatctgtcagtgagggccaagttttccgcgaggtatccacaacgccggcggccgcggtgtctcgcacacggcttcgacggcgtttctggcgcgtttgcagggccatagacggccgccagcccagcggcgagggcaaccagcccggtgagcgtcggaaagggtcgacggatcttttccgctgcataaccctgcttcggggtcattatagcgattttttcggtatatccatcctttttcgcacgatatacaggattttgccaaagggttcgtgtagactttccttggtgtatccaacggcgtcagccgggcaggataggtgaagtaggcccacccgcgagcgggtgttccttcttcactgtcccttattcgcacctggcggtgctcaacgggaatcctgctctgcgaggctggccggctaccgccggcgtaacagatgagggcaagcggatggctgatgaaaccaagccaaccaggaagggcagcccacctatcaaggtgtactgccttccagacgaacgaagagcgattgaggaaaaggcggcggcggccggcatgagcctgtcggcctacctgctggccgtcggccagggctacaaaatcacgggcgtcgtggactatgagcacgtccgcgagctggcccgcatcaatggcgacctgggccgcctgggcggcctgctgaaactctggctcaccgacgacccgcgcacggcgcggttcggtgatgccacgatcctcgccctgctggcgaagatcgaagagaagcaggacgagcttggcaaggtcatgatgggcgtggtccgcccgagggcagagccatgacttttttagccgctaaaacggccggggggtgcgcgtgattgccaagcacgtccccatgcgctccatcaagaagagcgacttcgcggagctggtattcgtgcagggcaagattcggaataccaagtacgagaaggacggccagacggtctacgggaccgacttcattgccgataaggtggattatctggacaccaaggcaccaggcgggtcaaatcaggaataagggcacattgccccggcgtgagtcggggcaatcccgcaaggagggtgaatgaatcggacgtttgaccggaaggcatacaggcaagaactgatcgacgcggggttttccgccgaggatgccgaaaccatcgcaagccgcaccgtcatgcgtgcgccccgcgaaaccttccagtccgtcggctcgatggtccagcaagctacggccaagatcgagcgcgacagcgtgcaactggctccccctgccctgcccgcgccatcggccgccgtggagcgttcgcgtcgtctcgaacaggaggcggcaggtttggcgaagtcgatgaccatcgacacgcgaggaactatgacgaccaagaagcgaaaaaccgccggcgaggacctggcaaaacaggtcagcgaggccaagcaggccgcgttgctgaaacacacgaagcagcagatcaaggaaatgcagctttccttgttcgatattgcgccgtggccggacacgatgcgagcgatgccaaacgacacggcccgctctgccctgttcaccacgcgcaacaagaaaatcccgcgcgaggcgctgcaaaacaaggtcattttccacgtcaacaaggacgtgaagatcacctacaccggcgtcgagctgcgggccgacgatgacgaactggtgtggcagcaggtgttggagtacgcgaagcgcacccctatcggcgagccgatcaccttcacgttctacgagctttgccaggacctgggctggtcgatcaatggccggtattacacgaaggccgaggaatgcctgtcgcgcctacaggcgacggcgatgggcttcacgtccgaccgcgttgggcacctggaatcggtgtcgctgctgcaccgcttccgcgtcctggaccgtggcaagaaaacgtcccgttgccaggtcctgatcgacgaggaaatcgtcgtgctgtttgctggcgaccactacacgaaattcatatgggagaagtaccgcaagctgtcgccgacggcccgacggatgttcgactatttcagctcgcaccgggagccgtacccgctcaagctggaaaccttccgcctcatgtgcggatcggattccacccgcgtgaagaagtggcgcgagcaggtcggcgaagcctgcgaagagttgcgaggcagcggcctggtggaacacgcctgggtcaatgatgacctggtgcattgcaaacgctagggccttgtggggtcagttccggctgggggttcagcagccagcgctttactggcatttcaggaacaagcgggcactgctcgacgcacttgcttcgctcagtatcgctcgggacgcacggcgcgctctacgaactgccgataaacagaggattaaaattgacaattgtgattaaggctcagattcgacggcttggagcggccgacgtgcaggatttccgcgagatccgattgtcggccctgaagaaagctccagagatgttcgggtccgtttacgagcacgaggagaaaaagcccatggaggcgttcgctgaacggttgcgagatgccgtggcattcggcgcctacatcgacggcgagatcattgggctgtcggtcttcaaacaggaggacggccccaaggacgctcacaaggcgcatctgtccggcgttttcgtggagcccgaacagcgaggccgaggggtcgccggtatgctgctgcgggcgttgccggcgggtttattgctcgtgatgatcgtccgacagattccaacgggaatctggtggatgcgcatcttcatcctcggcgcacttaatatttcgctattctggagcttgttgtttatttcggtctaccgcctgccgggcggggtcgcggcgacggtaggcgctgtgcagccgctgatggtcgtgttcatctctgccgctctgctaggtagcccgatacgattgatggcggtcctgggggctatttgcggaactgcgggcgtggcgctgttggtgttgacaccaaacgcagcgctagatcctgtcggcgtcgcagcgggcctggcgggggcggtttccatggcgttcggaaccgtgctgacccgcaagtggcaacctcccgtgcctctgctcacctttaccgcctggcaactggcggccggaggacttctgctcgttccagtagctttagtgtttgatccgccaatcccgatgcctacaggaaccaatgttctcggcctggcgtggctcggcctgatcggagcgggtttaacctacttcctttggttccgggggatctcgcgactcgaacctacagttgtttccttactgggctttctcagcccccgagcgcttagtgggaatttgtaccccttatcgaaccgggagcacaggatgacgcctaacaattcattcaagccgacaccgcttcgcggcgcggcttaattcaggagttaaacatcatgagggaagcggtgatcgccgaagtatcgactcaactatcagaggtagttggcgtcatcgagcgccatctcgaaccgacgttgctggccgtacatttgtacggctccgcagtggatggcggcctgaagccacacagtgatattgatttgctggttacggtgaccgtaaggcttgatgaaacaacgcggcgagctttgatcaacgaccttttggaaacttcggcttcccctggagagagcgagattctccgcgctgtagaagtcaccattgttgtgcacgacgacatcattccgtggcgttatccagctaagcgcgaactgcaatttggagaatggcagcgcaatgacattcttgcaggtatcttcgagccagccacgatcgacattgatctggctatcttgctgacaaaagcaagagaacatagcgttgccttggtaggtccagcggcggaggaactctttgatccggttcctgaacaggatctatttgaggcgctaaatgaaaccttaacgctatggaactcgccgcccgactgggctggcgatgagcgaaatgtagtgcttacgttgtcccgcatttggtacagcgcagtaaccggcaaaatcgcgccgaaggatgtcgctgccgactgggcaatggagcgcctgccggcccagtatcagcccgtcatacttgaagctaggcaggcttatcttggacaagaagatcgcttggcctcgcgcgcagatcagttggaagaatttgttcactacgtgaaaggcgagatcaccaaggtagtcggcaaataatgtctaacaattcgttcaagccgacgccgcttcgcggcgcggcttaactcaagcgttagagagctggggaagactatgcgcgatctgttgaaggtggttctaagcctcgtcttgcgatggcatttcgatccattcccattccgcgctcaagatggcttcccctcggcagttcatcagggctaaatcaatctagccgacttgtccggtgaaatgggctgcactccaacagaaacaatcaaacaaacatacacagcgacttattcacacgagctca

SEQ ID NO: 64 - DNA, 38074 bp, Artificial sequence
  plasmid pDAB108207
aattacaacggtatatatcctgccagtcagcatcatcacaccaaaagttaggcccgaatagtttgaaattagaaagctcgcaattgaggtctacaggccaaattcgctcttagccgtacaatattactcaccggatcctaaccggtttaattaaggcgcgccatgcccgggcaagcggccgcacaagtttgtacaaaaaagcaggcttctagacctaggtggagtcatcacgcagactatctcagcatgtgcgtagcacgcggccgcagcttatagtaaagatttttttgttaataaaatgaaagttaatatttatggatttatttgaacatatttacaagtttttgttaataaatttatttacagaagtgttaaatttgaaaatgtgttaaatgagagttaatatttatggatataatattactttatttaaaaataaaatgaatttatattaaaatatgatttggtaaaagatattataaagaggaacttggatgagaaagacgacgatgggcaaaagttgcatggcacaccgcttttgttcagtaacatctgcactgtggcgcctttttcacactcaccatgcatgctgccacgtcagctttcacactatgacaccactggccatacacgttgccacctcagctttctcctcttctcactatgacacgactggccatgcatgcatgcatgctgccacctcagctcccgcctcttcacccgtgtctttctctcatgtcgcagtgctgcgtgccaacctcttctctctataaatagagagaagagaatgatggttaaactcaaaccaaaacaagaaaacatacacaaatagcaaaacggatccacaaccaaaaatggcagcgaggctgcaagagcagaaaggaggtgagatggacacgaggattgcgatcataggcatgagcgccatacttccttgtggaaccacggtgagagagtcatgggagaccataagggctggcattgattgcctgtctgatcttcctgaggatcgtgttgatgtgactgcgtactttgacccagtcaagaccacaaaggacaaaatctactgcaagagaggaggtttcattcctgagtatgactttgatgcgcgtgagtttggtctcaacatgttccagatggaagattctgatgcgaatcagaccatctcacttctcaaggtcaaagaagcacttcaagatgctgggattgatgcacttggaaaggagaagaaaaacataggatgcgtgcttggcattggaggtggacagaagagttcacatgagttctacagcagactcaactatgtggttgtggagaaagtcttgagaaagatggggatgccagaggaagatgtcaaagtggctgtggagaagtacaaagcgaacttcccagaatggagacttgactctttccctggattccttgggaatgtcactgctggcagatgcaccaacacattcaacttggatggcatgaactgcgttgtggatgctgcatgtgcaagctccttgatagcagtcaaggttgcgattgatgaactgctctatggtgactgcgacatgatggtcactggtgcaacctgcacagacaactccattgggatgtacatggctttctcaaagacacctgtgttcagcacggacccaagtgtgagagcgtatgatgagaaaacgaaagggatgctcattggtgagggatcagccatgttggtgctcaaacgttatgcagatgcagtgagggatggtgatgagattcatgctgtgattcgtggttgtgcaagctcaagtgatggcaaagcagctggcatctacactcccacaatcagtggtcaagaggaagccttgagacgtgcatacaatcgtgcctgcgttgaccctgccactgtcactttggttgagggtcatgggactggcactccagttggagataggattgagttgactgcgttgaggaacttgtttgacaaagcgtatggtgaagggaacacagagaaagttgcagttggaagtatcaagtccagtattggtcatttgaaggctgttgctggtcttgctggaatgatcaaggtcatcatggctctcaaacacaagactttgcctggaacgatcaatgtggacaatccacccaatctctatgacaacactcccatcaatgagtcatccctctacatcaacacgatgaacagaccctggttccctccacctggtgttccgagacgtgctggaatatccagctttggctttggaggtgccaactaccatgcagtgttggaagaggctgaaccagagcacacgacagcgtacagactcaacaaacgtccacaaccggtgttgatgatggctgcaactcctgctgcgttgcagagcctttgtgaagctcagctgaaagagtttgaagctgcgatcaaggagaatgagacagtcaagaatactgcctacatcaagtgtgtcaagtttggagaacagttcaagttccctgggagcatacctgcgaccaatgcgagactgggattcttggtcaaagatgcggaggatgcgtgctccacgcttcgtgctatatgtgctcagtttgccaaagatgtgaccaaagaagcgtggaggcttccgagagaaggagtttctttccgtgccaaaggcattgccaccaatggtgctgttgctgcactcttctctggacaaggtgctcagtacacacacatgttcagtgaagttgcgatgaactggcctcagttcagacagtccattgctgcaatggacgctgcacagtccaaggttgctggaagtgacaaagactttgaaagagtctctcaagtcctgtacccaaggaaaccgtacgaacgtgagccagaacaagatcacaagaaaatctcactcacagcatacagccagccgtcaaccctggcatgtgctcttggtgcctttgagattttcaaggaagctggattcactccagactttgcagctggacacagcttgggtgagtttgctgcgctctatgcagctggttgtgttgacagagatgagttgtttgaacttgtttgcagaagggcaaggatcatgggaggcaaagatgcacctgccacacccaaaggttgcatggcagctgtcataggacccaacgcagagaacatcaaggttcaagctgccaacgtctggcttggaaactcaaactctccgtctcagactgtcattactgggtctgttgaagggattcaagctgaaagtgccagattgcagaaggaagggttcagagttgtgcctcttgcttgtgagtctgccttccattctccacagatggaaaatgccagctcagctttcaaagatgtcatatccaaggtttccttccgtacacccaaagcagaaacaaagctcttcagcaatgtttctggagagacctatccgacggatgccagagagatgctcactcaacacatgacctcatctgtgaagttcctgacccaagtgaggaacatgcaccaagctggtgcgagaatctttgttgagtttggaccgaaacaagttctcagcaaacttgtttctgaaaccctcaaagatgacccgtctgttgtcacagtgtctgtgaacccagcttctggcacggactctgacatacagttgagggatgctgcagttcagctggttgtggctggtgtcaatcttcaagggtttgacaagtgggatgctcctgatgccacgaggatgcaagccatcaagaaaaagagaaccacactcagactttcagctgccacctatgtcagtgacaagaccaagaaagtgagggatgctgccatgaacgacggaagatgtgtcacatacctcaagggtgctgcaccactcatcaaggctcctgaacctgtggttgacgaagctgccaagagggaggctgaaaggcttcagaaggagcttcaagacgctcagaggcagcttgacgacgccaaacgtgcagctgcagaagccaactccaaacttgctgctgccaaggaggaagccaagactgctgcagcttcagccaagcctgcagttgacactgctgttgtggagaaacatcgtgccatcctcaagtccatgctggctgagctggatggttatggaagtgttgatgcttcttcccttcagcaacagcaacagcaacagactgctccggcgcctgttaaagccgctgcccctgccgctcccgttgcaagtgctcctgctcccgccgtgtccaacgagttgcttgagaaagctgagacagttgtgatggaggttctcgctgccaagactggatacgaaacagacatgattgaggcggacatggagcttgagactgagttgggaattgacagcatcaagagggttgaaattctttctgaagtccaagctatgcttaacgttgaggcgaaagatgttgatgctctctctaggacgagaacagtgggtgaagttgtcaacgctatgaaggcagaaatcgctggttcttccgctccggcgccggcagctgccgcacctgcaccggctaaagcggctccagctgcagctgcaccagctgtttctaatgagctgctcgaaaaggcagaaactgttgtgatggaagtccttgctgccaaaactggctacgaaactgacatgatagaatcagacatggagcttgagacggagcttggaattgattccatcaagcgtgtggaaatcctcagtgaagtccaagccatgctcaatgtggaagctaaggatgtggatgctctctcaaggaccagaactgtcggtgaggttgtcaatgccatgaaggctgagatagctggaggctccgctcctgcgccggccgctgccgctcctggtcccgctgccgcggctccagctccagctgcagccgctccggccgtctcaaacgaactccttgaaaaagctgagaccgtcgtgatggaggtcttggcagctaaaaccggctatgagactgacatgattgagtctgacatggaattggagacagaacttgggatagacagcatcaaacgtgttgaaatcctcagtgaggtccaagctatgctgaacgtggaagcgaaggatgttgatgctctgtccagaacgaggaccgttggtgaggttgtggatgccatgaaggctgaaattgctggagggtctgcgcccgcgccagctgcagccgctcctgcacccgcagccgcggcacctgctccagctgcacctgcacctgccgtttcttcagaactcttggagaaggctgagacggttgtgatggaggttttggctgcaaagactggctatgagaccgacatgattgaatctgatatggaattggagacagagcttgggatcgattccatcaaaagagtggagatcctgagtgaagtccaagccatgctcaatgttgaagctaaggatgttgatgcactttcaagaacaaggacagtgggtgaggttgtggatgccatgaaggcggagattgctggagggagcgcgcctgcgccagctgccgcggcacctgcaccggcagccgcagctccagctccagctgcaccagcaccggccgcgcccgcgccagctgtttcatccgaactcctggaaaaggccgagacggttgtgatggaggtgctcgcagctaagactggttacgagaccgacatgattgaaagtgacatggagcttgaaaccgagttgggaatagatagcatcaaacgtgttgaaatcttgtctgaggtccaagctatgttgaacgtggaggcaaaagatgtcgatgcgctttcaagaaccagaacagtcggtgaggtcgtggacgccatgaaggctgaaattgccggaagctctgctagtgcgccagctgcagccgcacctgcacctgctgccgcggcacctgctccagctgcagccgctcctgccgtcagcaatgagttgctggagaaagccgaaacagttgtgatggaagtccttgctgcaaaaactggttacgaaacggacatgattgagtcagacatggaattggagaccgaacttggaatagattccatcaagagagtggagatcctctctgaggtgcaagccatgctcaacgttgaggctaaagatgttgatgcactcagtaggacaagaactgtgggggaagttgtcgatgcgatgaaggctgagattgctggaggctctgctcctgcgccggcagctgccgcacctgcacccgcagccgcggcaccagctgtcagcaacgaattgcttgagaaggctgaaacagttgtcatggaagtgctggctgcaaaaaccggctatgagactgacatgattgagtctgacatggaacttgagacggaattgggcattgacagcatcaagcgtgttgagatcctcagtgaagtccaagcaatgctcaatgtggaggctaaggatgtggatgccctctcaaggaccagaacagttggtgaggtcgttgatgcgatgaaggcggagatcgctggaagttccgcgcctgcgccagctgcagccgctcctgcacccgcagccgcggcaccggctccagctgcagccgcaccggccgtctcctcagaactcctggaaaaggctgagacagttgtgatggaagtccttgctgcgaaaactggctatgagaccgacatgattgaatctgacatggaactggagaccgagcttggaattgactccatcaaacgtgttgaaatcctctctgaggttcaagcgatgttgaatgtggaggccaaagatgttgatgctctttccagaacaaggacggtgggagaggtggttgatgccatgaaggctgagatagctgggggttctgctcctgcgccagctgcagccgctcctgctcccgctgccgcggcaccagctgtcagcaacgaactccttgaaaaagctgaaactgttgtgatggaggttttggctgcaaagactggatacgagactgacatgatagagtcagacatggagttggaaacagagcttgggattgatagcatcaagcgtgtggaaatcctttctgaggttcaagccatgctgaacgttgaggccaaagatgtcgatgctttgtcaaggaccagaacggttggagaagtggtcgatgccatgaaggctgagatagctggtggatcagcccctgctccggctgcagccgctcctgcaagtgccggtgctgcaccagctgtgaagattgattcagttcatggtgctgactgtgacgatttgtcactgatgcacgcaaaggtggttgacatcagaaggccagatgaactgattctggaaagaccggagaaccgtccagttcttgtcgttgacgatggctcagagttgacacttgctcttgtgagggtgttgggagcctgtgcagttgtcttgacctttgagggattgcagttggctcagagagctggtgcagctgccattcgtcatgttctggctaaggacctttcagcagaatcagctgagaaggccatcaaagaggctgagcaaagatttggagcgttgggaggcttcataagccagcaagcagaaaggtttgaaccagctgagatactgggtttcacactcatgtgtgcgaagtttgccaaagcctctctctgcactgctgtggctggaggtcgtcctgccttcatcggtgtggctaggcttgacggcagacttggattcacctctcaaggcacttctgacgcactcaagagagcacagcgtggagcgatctttggactctgcaagacaatagggttggagtggtcagaatctgatgtgttcagccgtggtgtggacattgctcaagggatgcacccagaagatgctgcagttgccatagttagggagatggcgtgtgctgacatcagaatcagagaggttgggattggagcaaaccagcaaagatgcacaatcagagctgccaagttggagactgggaaccctcagagacagatagcgaaagacgatgtgcttctggtttctggaggtgctcgtgggatcacacctctttgcatccgtgagatcacgcgtcagattgctggaggcaagtacattctgttgggtcgtagcaaagtttctgcgtctgaaccagcatggtgtgctggcatcactgatgagaaggctgtgcagaaagctgccacccaagagttgaagagggccttcagtgctggtgaaggacccaaacccactccaagggctgtcacgaaacttgtgggatctgttcttggtgctcgtgaagtgagaagctccattgctgccattgaagctctgggtggcaaagcgatctacagctcttgtgatgtgaactctgctgcagatgttgccaaagcagttagggatgcagagtcccagcttggtgccagagttagtggaatcgttcacgcttctggtgtgctccgtgatcgtctcatagagaagaaactccctgacgagtttgatgctgtctttgggaccaaagtcactgggttggagaatcttctggctgcagttgatcgtgccaacctcaaacacatggttctcttcagctcccttgctggtttccacggcaatgttggtcagtctgactatgcgatggcaaacgaagctctcaacaagatgggtttggaacttgcgaaggatgtcagtgtcaagtccatctgctttggtccctgggatggtgggatggtgacacctcaactcaagaaacagtttcaagaaatgggagttcagatcattcctcgtgaaggaggtgctgatacagttgcgaggattgtgttgggatcaagtcctgctgagatccttgttggaaactggaggacaccatccaagaaagttggaagtgacacgatcaccctgcatagaaagatcagtgccaagtccaatcccttcttggaggatcatgtcatacaaggcagaagggtgttgccaatgacccttgctattgggagccttgctgagacctgccttggactcttccctggctactctctctgggccatagatgacgcacagctcttcaaaggtgtcactgttgatggagacgtcaactgtgaagtgaccctcacaccgtccactgctccgagtgggagggtgaatgtccaagcgacgctcaagacgttctcaagtggaaaacttgttccagcctacagagctgtcatagtgttgtccaaccaaggtgctccacctgccaatgcaaccatgcagcctccgagccttgatgcagatcctgctttgcaagggtcagtctatgatggcaagactctctttcatggtcctgcgttcagaggcattgatgacgttctcagctgcaccaagagccagcttgttgccaagtgttctgctgttcctggatcagatgcagccagaggagagtttgcaactgacactgatgcacatgatccctttgtcaatgatcttgcctttcaagcaatgttggtctgggtgaggagaacgctgggacaagctgcactcccgaactccattcagaggatagtccaacacagaccggtcccacaagacaaacccttctacatcaccctcagatccaatcagagtggtggacatagccagcacaaacatgcacttcagttccacaacgaacaaggtgatctcttcattgatgttcaagcctctgtcattgcgacagactcacttgcgttctgagtagttagcttaatcacttaggtcacccagtccaagcccggcctagcacgatgatcatgagtgttgctattgatgtatgttaatactatacacagtcatcgtgtgtgttttataaaactgtaagcttaggatgtttgaggctaatgtaattagcactacaccgtaataaatgagaggtttactttatgttttaataatgttcttacccttgctgctctctaaactgtaatggcgtacggttagctaaactaaagtaaaaatcgattcgcttgagtaaaattagtgaccgggaaagatcatcgactactactgctcagagatgtaatcggtaattaagacttcaagctcaataattaattaggagtaaatctggcttcgaatttttaaattgtcaacttccaaagaaggattggcaagactcaatctcaattgcccaacaaacatatggctctttacaaatttggaatctctttttgatggcaagaacgtcgtaattcctctgtcgatctcatgtaattaccaaactcatctacttattactttctttatatgcacttactgatgcggccgcttaattaagatgagtgatactcaggactcaggactcactctgctgatcactagtgctagcctcgaggtcgacacaactttgtatacaaaagttgtctagacctaggctcagcaactcatccagtcaagttcgagtcagtgagttgggcggccgcgaattcggcgcgccaaccttggactcccatgttggcaaaggcaaccaaacaaacaatgaatgatccgctcctgcatatggggcggtttgagtatttcaactgccatttgggctgaattgaagacatgctcctgtcagaaattccgtgatcttactcaatattcagtaatctcggccaatatcctaaatgtgcgtggctttatctgtctttgtattgtttcatcaattcatgtaacgtttgcttttcttatgaattttcaaataaattatcgatagtactacgaatatttcgtatcgctgatcttctcaatcacaatgatgcgtagtgacccgacaaataatttaagcgtccttaataccaatcctaaaataattgaggcaaataaaatttttttgtaatttttatgatagcagatcgattctccagcaagcctgcaacaaaatattgtgtatttctaaatagattttgatactcgaggtgaccgaattcgttggtagggtgctaggaaacttgtttttggggttttgtataagggttgaaacatccctgaagtgtctcattttattttatttattctttgctgataaaaaaataaaataaaagaagctaagcacacggtcaaccattgctctactgctaaaagggttatgtgtagtgttttactgcataaattatgcagcaaacaagacaactcaaattaaaaaatttcctttgcttgtttttttgttgtctctgacttgactttcttgtggaagttggttgtataaggattgggacaccattgtccttcttaatttaattttattctttgctgataaaaaaaaaaaatttcatatagtgttaaataataatttgttaaataaccaaaaagtcaaatatgtttactctcgtttaaataattgagattcgttccagcaaggctaaacgattgtatagatttatgacaatatttacttttttatagataaatgttatattataataaatttatatacatatattatatgttatttattatttattattattttaaatccttcaatattttatcaaaccaactcataattttttttttatctgtaagaagcaataaaattaaatagacccactttaaggatgatccaacctttatacagagtaagagagttcaaatagtaccttttcatatacatatcaactaaaatattagaaatatcatggatcaaaccttataaagacattaaataagtggataagtataatatataaatgggtagtatataatatataaatggatacaaacttctctctttataattgttatgtctccttaacatcctaatataatacataagtgggtaatatataatatataaatggagacaaacttcttccattataattgttatgtcttcttaacacttatgtctcgttcacaatgctaaagttagaattgtttagaaagtcttatagtacacatttgtttttgtactatttgaagcattccataagccgtcacgattcagatgatttataataataagaggaaatttatcatagaacaataaggtgcatagatagagtgttaatatatcataacatcctttgtttattcatagaagaagtgagatggagctcagttattatactgttacatggtcggatacaatattccatgctctccatgagctcttacacctacatgcattttagttcatactggtgacctaagtgattaagctaactactcagtaatgccagaacttgggctgccaaccaaaacccgcaacagccacagctgcaacacaattgtcatctggcacaagctccaacagagaccacgcaggagctgtttggagcttggcaggttctgttggggtgagtgctatctcgatctcttcaagtttggctattccatctcccgttgctttgagataagcctctttgcaagtccagtaacgaaagaaaatcttctgtttctgctcatcagggagtgacctcaagagttcatattctcttgggagaaagaacctctttgcaagagactccaagtcagatgttggacgcagatattcaagatcaatgcctatttgacgcgtgtagttgacagcacacaaggcaaggttctggctgtgagacaagttgaacaggagtccactctcagcaaatctgtcaccaaggatcggtttcccacgggactcataatcaaacttgacttgacccggttccactcccaagtatccacccaagatggatctgaggatgcctctcccagcagtgaaacgccttctgtgttctggaaagtagaatctgtttgccctcgccaattcatcactgctcagggtggcagcaaggtcttgaagttgtgactcaggctggtcaagaggaatcctccagagatgaacctcatctgacaagagggtcagattgggaggcttcggaagccaagtgtgctgaagcatttttggttgtggatcctagagtagtattgaatatgagttgggttggggtattatagtagtagagtagtagtactctggatggatggatgatgaaagaagtgagtgatattagaggtatttataggtattatataagagagaaggtggttggaacatgcatggagatttgggcatgggatgacacgcatatgcaggttgacgtgtgttgaagtgaagaaattgaggtggcggaagagaatgaatatatacaggtggttgtggtgatgatgaagaaaaaggcaatgtgtttgtgtgtgggttgagatgggtgagccatttaaagtgcatgttaagcacgtgttgctttgcatggcatttagacatacatggacgcggcgatcttgatcagccagtgactaatttgagttggttgtgtgattgcgttttgtctctctgttttgtcttttttctttgttctttgtctttttcttgcgcaagatccatgcatgaaccaaaagaccacagagtgtcatggcaacccacagtaattccagttacggacttacataccaagaaaaggtaaaagcaataagaaatatatgaaaattagtccaccataaatcttatagtttatggtttagggtaacactctaacactctactacattacttatatttactttaaactatctataaaacaatttaaacatagtagaataataaatcaatagtcacaaattcaacaattaaacttaaaattaaaaaagtaatattttaattatatctaattaattttttagaagtaatattgagtatttgatatatgaaatcttgaatatagtaactattattaaaattactttagaagatgtgtctcgcatgtaaaagcagatctaatctgacctgaccactagacctgagtgagtacagatgtgctactagtgctagcctcgaggtcgaccaacttttctatacaaagttgtctagacctaggactaggcactgagtgactcactgacctgactgagtgactggcggccgcagcttatagtaaagatttttttgttaataaaatgaaagttaatatttatggatttatttgaacatatttacaagtttttgttaataaatttatttacagaagtgttaaatttgaaaatgtgttaaatgagagttaatatttatggatataatattactttatttaaaaataaaatgaatttatattaaaatatgatttggtaaaagatattataaagaggaacttggatgagaaagacgacgatgggcaaaagttgcatggcacaccgcttttgttcagtaacatctgcactgtggcgcctttttcacactcaccatgcatgctgccacgtcagctttcacactatgacaccactggccatacacgttgccacctcagctttctcctcttctcactatgacacgactggccatgcatgcatgcatgctgccacctcagctcccgcctcttcacccgtgtctttctctcatgtcgcagtgctgcgtgccaacctcttctctctataaatagagagaagagaatgatggttaaactcaaaccaaaacaagaaaacatacacaaatagcaaaacggatccacaaccaaaaatggcgcttcgtgtcaagaccaacaagaagccatgttgggagatgaccaaggaggaactgacctctggcaaaactgaggtgttcaactatgaggaactcctggagtttgcagagggtgacatagctaaggtttttggtccggagtttgctgtcatagacaagtaccccagaagggtgaggctgcctgctcgtgaatacctgcttgtgacaagggtcacactcatggatgccgaggtcaacaactacagagttggtgccagaatggtcactgagtatgatcttccagtgaatggcgaattgtctgagggaggtgattgtccctgggcagttctggttgagagtggacagtgcgatttgatgctgatatcatacatgggaattgatttccagaaccaaggtgacagagtttaccgtctgctcaacaccacgttgacattctatggggttgcccatgagggagagacccttgagtatgacatcagagtgaccggttttgccaaacgtttggatggtggcatctccatgttcttctttgagtatgactgctatgtcaatgggaggcttctcattgagatgagagatggctgtgctggcttcttcacaaatgaggagcttgatgcgggaaagggtgtggtgttcacaagaggggatttggctgccagagctaagattccaaagcaagatgtttctccctatgctgtcgctccctgccttcacaaaacaaaactcaacgaaaaggagatgcagaccttggttgacaaagattgggcttccgtttttggctcaaagaatggcatgccggagatcaactacaaactctgcgcacgtaagatgctcatgattgatagagtcaccagcattgaccataagggaggtgtgtacggtttgggtcagttggttggtgagaaaatcttggagagggaccattggtacttcccatgccattttgttaaggatcaagtcatggctggatctcttgtcagcgacggttgttcacaaatgctcaagatgtacatgatctggctcggtttgcaccttaccaccggaccatttgacttcagacccgtcaacggacacccgaacaaagttaggtgtaggggtcagatatctcctcataagggaaagttggtctacgtcatggagatcaaagagatgggattcgacgaggataacgatccgtacgccattgctgacgtcaacatcattgacgttgatttcgaaaagggtcaagatttcagccttgatagaatcagcgactacggaaagggggatcttaacaaaaagatcgtcgtggacttcaagggcattgctctcaagatgcagaagagatccacgaacaagaacccctccaaagttcagcccgtttttgctaacggtgcagccactgtgggaccggaagcgtccaaggccagctctggtgccagtgctagtgcttctgctgcccctgcgaagcctgctttctcagcagatgttcttgcgccaaagccagttgcacttcctgaacatatcctcaagggtgacgctctcgctccgaaagaaatgtcctggcatcccatgtcaaaacttcctggcaacccgacgccgttcttctcccctagttcttaccctccgagggcaatttgcttcatccctttccctggcaacccacttgacaacaattgcaaagctggagaaatgcctctgaactggtacaacatgtcagagttcatgtgtggaaaagttagcaactgcttgggaccagagttcgcaagatttgataagtcaaatacgagcagaagccctgcttttgatttggctcttgtgactagagttgttgaagtcacaaacatggaacatggcaagttcctgaatgttgattgcaatcccagcaaaggcacaatggtgggggagtttgactgtcctcaagatgcgtggttctttgatggttcttgcaatgatgggcacatgccttattccatcatcatggaaatcggacttcagacatccggtgttctcaccagtgtgttgaaagcaccactgacgatggacaaagatgacattctctttaggaaccttgatgcaagtgctgaaatggtgaggccagatgtggatgtgagggggaaaaccataaggaatgtgaccaagtgcactggatatgcaatgttgggaaagatggggattcacagattcacgtttgagttgtctgttgatggcgtggttttctacaaaggaagcacttcctttggatggttcactccagaggtgtttgctcagcaagctggacttgacaatgggaaaaagacggagccttggtgcaaaactaacaacacgagtgtgagaagagttgaaatcgcatcagccaaaggcaaagaacagctgactgagaaacttccagatgcaactaatgctcaagttctcagaaggtcagaacagtgtgagtatttggattacctcaacattgctcctgattctgggctgcatgggaaaggatatgcgcatggacacaaagatgttaacccacaagactggttcttctcttgtcacttttggtttgatcctgtgatgcctggatctttgggaattgagtcaatgttccagctcattgaggcatttgcggtggaccagaacataccgggagaatacaatgtgagcaatccgacctttgcccatgcccctggaaaaacggcgtggaagtaccgtggtcaattgacaccaaagaaccgtgcgatggactgtgaggtgcacatagtttcaatcacagcctctcctgaaaatggaggctacgttgacatagtggcagatggagcactttgggttgatggtctccgtgtgtatgaagccaaagaactcagagttcgtgttgtcagtgcaaaacctcaagccattccggatgttcaacaacagccacccagcgcaaaagcggaccctgggaaaactggagttgcactcagtccgactcagttgagagatgtcctgcttgaagtggacaatccattgtatcttggtgttgaaaactccaatttggtgcagtttgaatccaaacctgcaacttcttcaaggattgtcagtatcaaaccatgctccataagtgatcttggtgacaagtccttcatggaaacgtacaatgtgtcagcacctctgtacactggagcaatggccaagggaattgcgtctgcggaccttgtcattgctgctgggaagaggaagatattgggttcttttggagcgggtgggcttccaatgcaccatgtgagggcagctttggagaagatacaagcggctctgcctcaaggaccatatgctgtgaacctcattcattcaccttttgacagcaacttggaaaaggggaatgttgatctcttcctcgaaaagggcgttactgtggtggaggcttctgcattcatgaccctcactccccaagttgttcgttaccgtgcagccggactctcaaggaacgctgatgggagtgtcaacatcagaaaccgtatcattggaaaagtgtccagaacagaactcgccgaaatgttcatcagaccggctccggaacacctccttgagaaactcatagcttctggtgagataacacaagaacaagccgaacttgcccgtcgtgttcctgtcgcagacgacatcgctgttgaagctgattctggtggtcacactgacaaccgtcccatccacgtcatcttgcctttgatcatcaaccttaggaacagactgcacagagagtgtggttatcctgcgcaccttagagtcagagttggagctggaggcggtgttggctgcccacaagctgctgcggctgccctcacaatgggagctgccttcatagtgactgggactgtcaatcaagttgctaaacagtccgggacatgtgacaacgtgagaaaacaactcagtcaagccacctacagtgacatttgcatggctccagcagctgatatgtttgaggaaggtgtgaaactccaagttctcaagaagggaacaatgttcccatcaagagctaacaaattgtacgaactcttttgcaagtacgactctttcgattcaatgcctcctgctgaacttgaaaggatcgagaagaggatcttcaagagggcacttcaagaggtctgggaagagaccaaggacttttacatcaatggtttgaagaatccagagaagatacagagagcggaacatgaccccaaactcaagatgtctttgtgtttcagatggtatcttggtcttgcatcacgttgggccaacatgggtgctcctgatcgtgtcatggactatcaagtctggtgtggtccagccattggagccttcaatgacttcatcaaaggaacatatcttgatcctgctgtctctaatgagtacccatgtgttgtccagatcaaccttcagattttgcgtggtgcatgttacctgaggcgtcttaatgctctgagaaatgatccgaggattgatcttgagactgaagatgctgcctttgtctatgagccaacgaatgcgctttgagtagttagcttaatcacttaggtcacccagtccaagcccggcctagcacgatgatcatgagtgttgctattgatgtatgttaatactatacacagtcatcgtgtgtgttttataaaactgtaagcttaggatgtttgaggctaatgtaattagcactacaccgtaataaatgagaggtttactttatgttttaataatgttcttacccttgctgctctctaaactgtaatggcgtacggttagctaaactaaagtaaaaatcgattcgcttgagtaaaattagtgaccgggaaagatcatcgactactactgctcagagatgtaatcggtaattaagacttcaagctcaataattaattaggagtaaatctggcttcgaatttttaaattgtcaacttccaaagaaggattggcaagactcaatctcaattgcccaacaaacatatggctctttacaaatttggaatctctttttgatggcaagaacgtcgtaattcctctgtcgatctcatgtaattaccaaactcatctacttattactttctttatatgcacttactgatgcggccgcttaattaatcacgagtggatgactgtcacgactgactcatgactgactactagtagcacatctgtactcactcaggtctagtggtcaggtcagattaattaagcggccgcgaattcggcgcgccaaccttggactcccatgttggcaaaggcaaccaaacaaacaatgaatgatccgctcctgcatatggggcggtttgagtatttcaactgccatttgggctgaattgaagacatgctcctgtcagaaattccgtgatcttactcaatattcagtaatctcggccaatatcctaaatgtgcgtggctttatctgtctttgtattgtttcatcaattcatgtaacgtttgcttttcttatgaattttcaaataaattatcgatagtactacgaatatttcgtatcgctgatcttctcaatcacaatgatgcgtagtgacccgacaaataatttaagcgtccttaataccaatcctaaaataattgaggcaaataaaatttttttgtaatttttatgatagcagatcgattctccagcaagcctgcaacaaaatattgtgtatttctaaatagattttgatactcgaggtcgacacaactttgtataataaagttgtctagacctagtagcacatctgtactcactcaggtctagtggtcaggtcagattaattaagcggccgcgaattcgttggtagggtgctaggaaacttgtttttggggttttgtataagggttgaaacatccctgaagtgtctcattttattttatttattctttgctgataaaaaaataaaataaaagaagctaagcacacggtcaaccattgctctactgctaaaagggttatgtgtagtgttttactgcataaattatgcagcaaacaagacaactcaaattaaaaaatttcctttgcttgtttttttgttgtctctgacttgactttcttgtggaagttggttgtataaggattgggacaccattgtccttcttaatttaattttattctttgctgataaaaaaaaaaaatttcatatagtgttaaataataatttgttaaataaccaaaaagtcaaatatgtttactctcgtttaaataattgagattcgttccagcaaggctaaacgattgtatagatttatgacaatatttacttttttatagataaatgttatattataataaatttatatacatatattatatgttatttattatttattattattttaaatccttcaatattttatcaaaccaactcataattttttttttatctgtaagaagcaataaaattaaatagacccactttaaggatgatccaacctttatacagagtaagagagttcaaatagtaccttttcatatacatatcaactaaaatattagaaatatcatggatcaaaccttataaagacattaaataagtggataagtataatatataaatgggtagtatataatatataaatggatacaaacttctctctttataattgttatgtctccttaacatcctaatataatacataagtgggtaatatataatatataaatggagacaaacttcttccattataattgttatgtcttcttaacacttatgtctcgttcacaatgctaaagttagaattgtttagaaagtcttatagtacacatttgtttttgtactatttgaagcattccataagccgtcacgattcagatgatttataataataagaggaaatttatcatagaacaataaggtgcatagatagagtgttaatatatcataacatcctttgtttattcatagaagaagtgagatggagctcagttattatactgttacatggtcggatacaatattccatgctctccatgagctcttacacctacatgcattttagttcatactggtgacctaagtgattaagctaactactcacagcttctcagcagggacatatgtgtcatcaatgctcgccacaagtgcagctgcaccatctgaaagccttgcatttctcagtatttcaagacgcctcaagaagcacgctcctctaagaatctgtttgttgatctgcacaacacacgggtactcatttgccactgccggatcaaggtaagttcctttgatgaaatcattgaatgaaccaatggcaggaccacaccaaacttggtagtccatgactctgtcagaagctccagtgttggcccaccttgaagccagggacagataccatctgaaacacagtgacatcttcagtttggggtccctctcagccctctgtatcttctctgggttgtggagacggttgatgtagaagttcttggtctcatcccagacctcttccaatgcacgactgaagattcttttctcaaccctcgcaagctctgctggaggcatggactcaaaagaatcatacttgcagaacaactcatagagtttgttggctcttgaagggaacattgttcctttcttcaaaacttgaagtttcacaccttcctcaaacatgtcagctgccggtgccatgcaaacatctgagtaagttgctttcgcaagctgtttcctcacattgtcacacgtcccagattgtttggcaacttggttcactgttccagtgacaatgaaagaggcacccatgttgaaagttgccagcgcagcttggggacacccaatgccacccccagcaccaacacgaaccctcaggtttgctgggtatccacactctctgtgaagcctatccctcaggttgataatcagaggcagaatgacatggattggacggttgtcagtgtgtccaccagaatcagcttcaaccgcaatgtcatcagccacaggaacacgtctggccaactcagcttgttcttgattgatctccccagaagcaatgagcttctgcaaaagatgctcaggtgcaggacgcatgaacatttcagccagctcagttctggagactttcccaatgattctgttccttatgttgactgacccatctgcattcctcgtcaacccagccgctctgtatctgacaacttgcggtgtcaacgtcatgaaggctgaagcctcaacaaaagtgacacccttttccaagaagagatcaacatttcccttctcaaggttgctgtcaaaaggagaatggatgaggttgacagcatatggtccattgggcagggcagcttgaatcttttcaatggactcacgcacaacttgcattggaaggcctccagcaccaaatgacgcaaggattccttgccttccagctgcgatcaccaagtccgcagaggcaattcccttggccattgcaccggtgtacagaggcgcagaaacaccataagttttcatgaaagctctgctgccaagatcagcaatgttgcacggagggacaatgacactggcatcagatggcgcagtctcaacaaggttgccagaagcacttgcagagctgagcgcaagcatggagtcaagatcaagcagggcactacgaagtgcatcagcactggcaacagcttttgtctccgcagctggggcagctttcttctgaactggagctgaaggagcaggagacggagatgaactgctggaagaggaactgctggaagagctggagctggaaggcgcattgtccttgttcaagatcggatctctggtctcatcttgctcatcaatgttgagacgcgcatagaatttcggagccacaggcttcatgatccttgaagagatggcagcttcaatcgcagggtccgcaggtgggaaggatgcaaggtctgctgaggagatggggtctgccttgctgttgaatctgccattcaactgaatctttctcacaaacttgtttttcttgggtttctcacctttacagagcgcagcataacaagcctcagcctctgcaacgagcttggagtggtagagcggactgatggtcactccaggaacaaggtgagccttcaatgaagccacgagcttgactattgtcgtccaagcatcctcgttctgcttgtctatggcaccagcaaggtggtttctctgtggtccaagcgtggttctcactgctgtgcttctgtgattgtttggcccaacttcaacaaacacatcatagttctgcttgtagatggtttcaactatctgagggaagttggcttgtttctcatagagctgtccagcatactccccaaaggatgaaggagcccattcatctttggcacccgtggctcttggcacaagcctcttctggtttatggtagtccagagatcaagaccatcaaccacagggaactcaaggttggcgtggatctttgcgatgtccttggtgtaaggtcccacctctgggcaatgcccacacatgccttgagtgactggaagcgcagggatgttgccaccaagacgagcaatcgcagctttgcatgcatcaggctttccactgatgagagcagtgttggcatcattgatgatggtcaacctcacatactttgagtctggtgctatggctgcttctatgtcttgtttcgttcccctcactatgtaaccttgccagaactcatcttttgggacagactgtggaatgccccaggcttctctgagcgcattgaactcaacagccagagctttgttccagacatctgactctctcaaatcctttgtcaactgatcgcttatcaaaccgtttttcttggagaaagcaaagatcatggaaatctctcccaaactgagtccaaaggctgctttgggcgtgatgttgagaacatctctcgccaggtttgtgaaggcaattgaggtgaggattccaagacggaacatttcaatcatgtttctgtcaaactcttgctgttgtgactcaagctcactcttgaagctggcccttggcatgacccatctgtcaccttcagcccagagacggtttgttttctcattgatgacctcatgaagttcaggccaaatcctatgaatgtcttgtgtgatgccatagtaagggctccttccttctccatacatgaaggcaactctgtcactggccaaaggctcaggcgcatatctgcttccagcaggggaactccaatcacgtctcatcttgagacatctcggaatgccttttgccgcaagttccacctctctctggagcttggatggagtggagaccaagctgagagcaaggggcttctgacttccagatgaagctgcatcttgggcaagggtctcaccaaggagttcaagaaagatcctacgggcttgcgccttcaattcagactctctgggtgcagcacccgtgggctgcaagaacctttcccttatcttgtccaatcttccaagaatctcttcatgggagtctgctctcaacacaatgagcttgggtgcttcctcatccaaactgattctgttctctctctcgtagtgtccctctgcttcagaaagcagcacactgtagcaacttctggtttcactgactccggaaacagccgcataacgtctctcaccagggttcttcaaccaagctcttgaggtctggcacgcaaagagtgtgctgtcccagggtgcttcaggtgcaggttcatcccagtcatctccattgctgggcaggtaacggttgtagatgcaaagcgcagccttaatcaaactggcagcaccagaagcataaccagtgtcaccaacagtggccttgacacttccagttgcaacattccttgggagcttgtcatcgtcacgaagaatcgtctgaagtccgccaatctcttcctcagcagtgagttcctttgggagaacagacgggtccttcaaatgcctcgctgaatcagcagaaagctccaacatctcgatgtctccaggcttgactctggcttgatccaatgcctctctcaaacatgcagatggaacatttccaggaactatggcatccatgcaagcatagattctgtcatccttggtgcagcttgtctcacgcttgagcacaaatgcaccacagccctctccaacaaagtaaccatcagcagctgcatcaaagctggctctcggggtgtcagatgtagacaccttgaaacgccttgacttgacgtaaaggttctcagcactcccacagagatcaacacccgcaaccacaaccccatcaacctctcccgtttccaagaggtatttgccaagttcagcacatctgtacacagaattgttgccttctgtgattgtgaaggaaggtcccgtgaagccccattgtgaactgacccttgttgcaaccaagttgcctatgtagctggtgtaagaagtgcttgtcccacaatcattgatgtactgcatcatgtcattgagtttcttgctggcttcaggcctcactctctccttgagagcaacccttgcacggtgacggtagagttcaagatcggtccccaaccccacaaagacagccacatttccacctttcttcatgccagagtccaatatggccctatcaattgtggtgacagccagaagctgttgaggcaagagcatatcttcaggagtcattggagtcctcagcctctggaaatcaacttcaacatcttcaatgtaacagccatgcggtgttgctttgactccacaaagatcaaggaagtccttgtctttccccaggaatctccatctcttttctgggagtggtatagcaccatgagcaccagtgtagatggccctttcaaaagcatccaatcctttcaaagcaccaaaagtggcatccatcccagtgattgctattctcatgtttgactcaccaccacaacgtgcagagagagcagaaatggagtcatggccagtgcatgcagcattgcttgggtcatgttcctcaaagacagcatgagcattggtcccaccaaatccaaacgctgagagaccagcacgcttcggttctccattcgtttctggccagggaatggcctcaccagagacaaccagagggtccatcttcgtttcgtcatctattcccggagtgggtggaatgatcccgtgcttcatggagagaagcactttgcacatgccagcaaacccagctgccaccaatgtgtgtccaaagttcccttttgtggttccaaaacgtgggactttgccttcaaagcaagccttcacagcatcaatttccacacgatcaccttgtggagtcccagttgcatggcattcaacatactgaatcttgtggggatgcacattgatacgtgtgtaggtgtccatgaggcactttttctctgacggcaaaaggggtttaagtggcagaccagtgccactgttgctgacattggctcccaaaagtgttccatagatgtgatctccatctctgattgcgtcatccaaacgtttgaggaccatgatggaacctccttcaccaggggtcaatccttgagaatctttgtgcagcggcatggacacattctgacccgttccaacaggcatggcttggaaggttgagaacccagagagtatgaaaaacggctccggcaggcatgttgcaccacaaagcatcacatcagctgcaccagagaccaagtgatcttgcgccagtctgagcacatagagcgcagtggcacaggcagcatcaacagagtagtggagagcgccaagattgagttcctcagcaacaaaggaagcagggtccatgaagattcttctgtcaccagcctctggtttgttggactgttctctttctgaccagtgagaggcatctttgaaaactctggcaccaagtttcttctcaacatggttctggtacacattcaagagttcaccttggaggttgtccatcgggaagctgaggcatccagaaactatgccacatcttgttgaatctttgacagatgtttcagccaaggcttgtttggcaaggttcaaaaggagttcatgctcattgtctatttcgttctcatcaagagttccatatgtctcattgcagaaggtgtcagcatacttgctcctttcagctttgtagtgttcagcacggtaatttgaaccaagacgtttgtcgctgatcactttgctctcaacttttccattcatgagaacttcccagaactcgtctttcgttttgcatccagcatactgaacagccatgcccacaacagctatcctcttctcgtcatgcatctcatgagccgcactcacgttccttgcagccatttttggttgtggatcctagagtagtattgaatatgagttgggttggggtattatagtagtagagtagtagtactctggatggatggatgatgaaagaagtgagtgatattagaggtatttataggtattatataagagagaaggtggttggaacatgcatggagatttgggcatgggatgacacgcatatgcaggttgacgtgtgttgaagtgaagaaattgaggtggcggaagagaatgaatatatacaggtggttgtggtgatgatgaagaaaaaggcaatgtgtttgtgtgtgggttgagatgggtgagccatttaaagtgcatgttaagcacgtgttgctttgcatggcatttagacatacatggacgcggcgatcttgatcagccagtgactaatttgagttggttgtgtgattgcgttttgtctctctgttttgtcttttttctttgttctttgtctttttcttgcgcaagatccatgcatgaaccaaaagaccacagagtgtcatggcaacccacagtaattccagttacggacttacataccaagaaaaggtaaaagcaataagaaatatatgaaaattagtccaccataaatcttatagtttatggtttagggtaacactctaacactctactacattacttatatttactttaaactatctataaaacaatttaaacatagtagaataataaatcaatagtcacaaattcaacaattaaacttaaaattaaaaaagtaatattttaattatatctaattaattttttagaagtaatattgagtatttgatatatgaaatcttgaatatagtaactattattaaaattactttagaagatgtgtctcgcatgtaaaagcagatctaactactgtcactgaggccgtagacgagtacggactgatctaactagtgctagcctcgaggtcgacacccagctttcttgtacaaagtggttgcggccgcttaattaaatttaaattcaattaatgcaatcttgattttcaacaacgaaggtaatggcgtaaaagaaaaaatgtatgttattgtattgatctttcatgatgttgaagcgtgccataatatgatgatgtataattaaaatattaactgtcgcattttattgaaatggcactgttatttcaaccatatctttgattctgttacatgacacgactgcaagaagtaaataatagacgccgttgttaaagaattgctatcatatgtgcctaactagagggaatttgagcgtcagacctaatcaaatattacaaaatatctcactctgtcgccagcaatggtgtaatcagcgcagacaaatggcgtaaagatcgcggaaaaacctccccgagtggcatgatagctgcctctgtattgctgatttagtcagccttatttgacttaagggtgccctcgttagtgacaaattgctttcaaggagacagccatgccccacactttgttgaaaaacaaattgcctttggggagacggtaaagccagttgctcttcaataaggaatgtcgaggaggcaatgtaaccgcctctggtagtacacttctctaatccaaaaatcaatttgtattcaagataccgcaaaaaacttatggtttaaaccctgcaggactagtccagaaggtaattatccaagatgtagcatcaagaatccaatgtttacgggaaaaactatggaagtattatgtaagctcagcaagaagcagatcaatatgcggcacatatgcaacctatgttcaaaaatgaagaatgtacagatacaagatcctatactgccagaatacgaagaagaatacgtagaaattgaaaaagaagaaccaggcgaagaaaagaatcttgaagacgtaagcactgacgacaacaatgaaaagaagaagataaggtcggtgattgtgaaagagacatagaggacacatgtaaggtggaaaatgtaagggcggaaagtaaccttatcacaaaggaatcttatcccccactacttatccttttatatttttccgtgtcatttttgcccttgagttttcctatataaggaaccaagttcggcatttgtgaaaacaagaaaaaatttggtgtaagctattttctttgaagtactgaggatacaacttcagagaaatttgtaagtttgtaggtaccagatctggatcccaaaccatgtctccggagaggagaccagttgagattaggccagctacagcagctgatatggccgcggtttgtgatatcgttaaccattacattgagacgtctacagtgaactttaggacagagccacaaacaccacaagagtggattgatgatctagagaggttgcaagatagatacccttggttggttgctgaggttgagggtgttgtggctggtattgcttacgctgggccctggaaggctaggaacgcttacgattggacagttgagagtactgtttacgtgtcacataggcatcaaaggttgggcctaggatctacattgtacacacatttgcttaagtctatggaggcgcaaggttttaagtctgtggttgctgttataggccttccaaacgatccatctgttaggttgcatgaggctttgggatacacagcccggggtacattgcgcgcagctggatacaagcatggtggatggcatgatgttggtttttggcaaagggattttgagttgccagctcctccaaggccagttaggccagttacccaaatctgagtagttagcttaatcacctagagctcgatcggcggcaatagcttcttagcgccatcccgggttgatcctatctgtgttgaaatagttgcggtgggcaaggctctctttcagaaagacaggcggccaaaggaacccaaggtgaggtgggctatggctctcagttccttgtggaagcgcttggtctaaggtgcagaggtgttagcgggatgaagcaaaagtgtccgattgtaacaagatatgttgatcctacgtaaggatattaaagtatgtattcatcactaatataatcagtgtattccaatatgtactacgatttccaatgtctttattgtcgccgtatgtaatcggcgtcacaaaataatccccggtgactttcttttaatccaggatgaaataatatgttattataatttttgcgatttggtccgttataggaattgaagtgtgcttgaggtcggtcgccaccactcccatttcataattttacatgtatttgaaaaataaaaatttatggtattcaatttaaacacgtatacttgtaaagaatgatatcttgaaagaaatatagtttaaatatttattgataaaataacaagtcaggtattatagtccaagcaaaaacataaatttattgatgcaagtttaaattcagaaatatttcaataactgattatatcagctggtacattgccgtagatgaaagactgagtgcgatattatggtgtaatacataggaattcgtttaaacgatctgcgtctaattttcggtccaacttgcacaggaaagacgtcgaccgcggtagctcttgcccagcagactgggcttccagtcctttcgctcgatcgggtccaatgttgtcctcagctgtgaaccggaagcggacgaccaacagtggaagaactgaaaggaacgagccgtctataccttgatgatcggcctctggtgaagggtatcatcgcagccaagcaagctcatgaaaggctgatgggggaggtgtataattatgaggcccacggcgggcttattctttagggaggatctatctcgttgctcaagtgcatggcgcaaagcagttattggagtgcggattttcgttggcatattattcgccacgagttagcagacgaagagaccttcatgaacgtggccaaggccagagttaagcagatgttacgccctgctgcaggcctttctattatccaatagttggttgatctttggaaagagcctcggctgaggcccatactgaaagagatcgatggatatcgatatgccatgttgtttgctagccagaaccagatcacatccgatatgctattgcagcttgacgcagatatggaggataagttgattcatgggatcgctcaggagtagctcatccatgcacgccgacaagaacagaaattccgtcgagttaacgcagccgcttacgacggattcgaaggtcatccattcggaatgtattagtttgcaccagctccgcgtcacacctgtcttcatttgaataagatgttagcaattgtttttagctttgtcttgttgtggcagggcggcaagtgcttcagacatcattctgttttcaaattttatgctggagaacagcttcttaattcctttggaaataatagactgcgtcttaaaattcagatgtctggatatagatatgattgtaaaataacctatttaagtgtcatttagaacataagttttatgaatgttcttccattttcgtcatcgaacgaataagagtaaatacaccttttttaacattacaaataagttcttatacgttgtttatacaccgggaatcatttccattattttcgcgcaaaagtcacggatattcgtgaaagcgacataaactgcgaaatttgcggggagtgtcttgagtttgcctcgaggctagcgcatgcacatagacacacacatcatctcattgatgcttggtaataattgtcattagattgtttttatgcatagatgcactcgaaatcagccaattttagacaagtatcaaacggatgtgacttcagtacattaaaaacgtccgcaatgtgttattaagttgtctaagcgtcaatttgatttacaattgaatatatcctgccccagccagccaacagctcgatttacaattgaatatatcctgccggccggcccacgcgtgtcgaggaattctgatctggcccccatttggacgtgaatgtagacacgtcgaaataaagatttccgaattagaataatttgtttattgctttcgcctataaatacgacggatcgtaatttgtcgttttatcaaaatgtactttcattttataataacgctgcggacatctacatttttgaattgaaaaaaaattggtaattactctttctttttctccatattgaccatcatactcattgctgatccatgtagatttcccggacatgaagccatttacaattgaatatatcctgccgccgctgccgctttgcacccggtggagcttgcatgttggtttctacgcagaactgagccggttaggcagataatttccattgagaactgagccatgtgcaccttccccccaacacggtgagcgacggggcaacggagtgatccacatgggacttttaaacatcatccgtcggatggcgttgcgagagaagcagtcgatccgtgagatcagccgacgcaccgggcaggcgcgcaacacgatcgcaaagtatttgaacgcaggtacaatcgagccgacgttcacgcggaacgaccaagcaagcttggctgccatttttggggtgaggccgttcgcggccgaggggcgcagcccctggggggatgggaggcccgcgttagcgggccgggagggttcgagaagggggggcaccccccttcggcgtgcgcggtcacgcgcacagggcgcagccctggttaaaaacaaggtttataaatattggtttaaaagcaggttaaaagacaggttagcggtggccgaaaaacgggcggaaacccttgcaaatgctggattttctgcctgtggacagcccctcaaatgtcaataggtgcgcccctcatctgtcagcactctgcccctcaagtgtcaaggatcgcgcccctcatctgtcagtagtcgcgcccctcaagtgtcaataccgcagggcacttatccccaggcttgtccacatcatctgtgggaaactcgcgtaaaatcaggcgttttcgccgatttgcgaggctggccagctccacgtcgccggccgaaatcgagcctgcccctcatctgtcaacgccgcgccgggtgagtcggcccctcaagtgtcaacgtccgcccctcatctgtcagtgagggccaagttttccgcgaggtatccacaacgccggcggccgcggtgtctcgcacacggcttcgacggcgtttctggcgcgtttgcagggccatagacggccgccagcccagcggcgagggcaaccagcccggtgagcgtcggaaagggtcgacggatcttttccgctgcataaccctgcttcggggtcattatagcgattttttcggtatatccatcctttttcgcacgatatacaggattttgccaaagggttcgtgtagactttccttggtgtatccaacggcgtcagccgggcaggataggtgaagtaggcccacccgcgagcgggtgttccttcttcactgtcccttattcgcacctggcggtgctcaacgggaatcctgctctgcgaggctggccggctaccgccggcgtaacagatgagggcaagcggatggctgatgaaaccaagccaaccaggaagggcagcccacctatcaaggtgtactgccttccagacgaacgaagagcgattgaggaaaaggcggcggcggccggcatgagcctgtcggcctacctgctggccgtcggccagggctacaaaatcacgggcgtcgtggactatgagcacgtccgcgagctggcccgcatcaatggcgacctgggccgcctgggcggcctgctgaaactctggctcaccgacgacccgcgcacggcgcggttcggtgatgccacgatcctcgccctgctggcgaagatcgaagagaagcaggacgagcttggcaaggtcatgatgggcgtggtccgcccgagggcagagccatgacttttttagccgctaaaacggccggggggtgcgcgtgattgccaagcacgtccccatgcgctccatcaagaagagcgacttcgcggagctggtattcgtgcagggcaagattcggaataccaagtacgagaaggacggccagacggtctacgggaccgacttcattgccgataaggtggattatctggacaccaaggcaccaggcgggtcaaatcaggaataagggcacattgccccggcgtgagtcggggcaatcccgcaaggagggtgaatgaatcggacgtttgaccggaaggcatacaggcaagaactgatcgacgcggggttttccgccgaggatgccgaaaccatcgcaagccgcaccgtcatgcgtgcgccccgcgaaaccttccagtccgtcggctcgatggtccagcaagctacggccaagatcgagcgcgacagcgtgcaactggctccccctgccctgcccgcgccatcggccgccgtggagcgttcgcgtcgtctcgaacaggaggcggcaggtttggcgaagtcgatgaccatcgacacgcgaggaactatgacgaccaagaagcgaaaaaccgccggcgaggacctggcaaaacaggtcagcgaggccaagcaggccgcgttgctgaaacacacgaagcagcagatcaaggaaatgcagctttccttgttcgatattgcgccgtggccggacacgatgcgagcgatgccaaacgacacggcccgctctgccctgttcaccacgcgcaacaagaaaatcccgcgcgaggcgctgcaaaacaaggtcattttccacgtcaacaaggacgtgaagatcacctacaccggcgtcgagctgcgggccgacgatgacgaactggtgtggcagcaggtgttggagtacgcgaagcgcacccctatcggcgagccgatcaccttcacgttctacgagctttgccaggacctgggctggtcgatcaatggccggtattacacgaaggccgaggaatgcctgtcgcgcctacaggcgacggcgatgggcttcacgtccgaccgcgttgggcacctggaatcggtgtcgctgctgcaccgcttccgcgtcctggaccgtggcaagaaaacgtcccgttgccaggtcctgatcgacgaggaaatcgtcgtgctgtttgctggcgaccactacacgaaattcatatgggagaagtaccgcaagctgtcgccgacggcccgacggatgttcgactatttcagctcgcaccgggagccgtacccgctcaagctggaaaccttccgcctcatgtgcggatcggattccacccgcgtgaagaagtggcgcgagcaggtcggcgaagcctgcgaagagttgcgaggcagcggcctggtggaacacgcctgggtcaatgatgacctggtgcattgcaaacgctagggccttgtggggtcagttccggctgggggttcagcagccagcgctttactggcatttcaggaacaagcgggcactgctcgacgcacttgcttcgctcagtatcgctcgggacgcacggcgcgctctacgaactgccgataaacagaggattaaaattgacaattgtgattaaggctcagattcgacggcttggagcggccgacgtgcaggatttccgcgagatccgattgtcggccctgaagaaagctccagagatgttcgggtccgtttacgagcacgaggagaaaaagcccatggaggcgttcgctgaacggttgcgagatgccgtggcattcggcgcctacatcgacggcgagatcattgggctgtcggtcttcaaacaggaggacggccccaaggacgctcacaaggcgcatctgtccggcgttttcgtggagcccgaacagcgaggccgaggggtcgccggtatgctgctgcgggcgttgccggcgggtttattgctcgtgatgatcgtccgacagattccaacgggaatctggtggatgcgcatcttcatcctcggcgcacttaatatttcgctattctggagcttgttgtttatttcggtctaccgcctgccgggcggggtcgcggcgacggtaggcgctgtgcagccgctgatggtcgtgttcatctctgccgctctgctaggtagcccgatacgattgatggcggtcctgggggctatttgcggaactgcgggcgtggcgctgttggtgttgacaccaaacgcagcgctagatcctgtcggcgtcgcagcgggcctggcgggggcggtttccatggcgttcggaaccgtgctgacccgcaagtggcaacctcccgtgcctctgctcacctttaccgcctggcaactggcggccggaggacttctgctcgttccagtagctttagtgtttgatccgccaatcccgatgcctacaggaaccaatgttctcggcctggcgtggctcggcctgatcggagcgggtttaacctacttcctttggttccgggggatctcgcgactcgaacctacagttgtttccttactgggctttctcagcccccgagcgcttagtgggaatttgtaccccttatcgaaccgggagcacaggatgacgcctaacaattcattcaagccgacaccgcttcgcggcgcggcttaattcaggagttaaacatcatgagggaagcggtgatcgccgaagtatcgactcaactatcagaggtagttggcgtcatcgagcgccatctcgaaccgacgttgctggccgtacatttgtacggctccgcagtggatggcggcctgaagccacacagtgatattgatttgctggttacggtgaccgtaaggcttgatgaaacaacgcggcgagctttgatcaacgaccttttggaaacttcggcttcccctggagagagcgagattctccgcgctgtagaagtcaccattgttgtgcacgacgacatcattccgtggcgttatccagctaagcgcgaactgcaatttggagaatggcagcgcaatgacattcttgcaggtatcttcgagccagccacgatcgacattgatctggctatcttgctgacaaaagcaagagaacatagcgttgccttggtaggtccagcggcggaggaactctttgatccggttcctgaacaggatctatttgaggcgctaaatgaaaccttaacgctatggaactcgccgcccgactgggctggcgatgagcgaaatgtagtgcttacgttgtcccgcatttggtacagcgcagtaaccggcaaaatcgcgccgaaggatgtcgctgccgactgggcaatggagcgcctgccggcccagtatcagcccgtcatacttgaagctaggcaggcttatcttggacaagaagatcgcttggcctcgcgcgcagatcagttggaagaatttgttcactacgtgaaaggcgagatcaccaaggtagtcggcaaataatgtctaacaattcgttcaagccgacgccgcttcgcggcgcggcttaactcaagcgttagagagctggggaagactatgcgcgatctgttgaaggtggttctaagcctcgtcttgcgatggcatttcgatccattcccattccgcgctcaagatggcttcccctcggcagttcatcagggctaaatcaatctagccgacttgtccggtgaaatgggctgcactccaacagaaacaatcaaacaaacatacacagcgacttattcacacgagctca

SEQ ID NO: 65 - DNA, 36718 bp, Artificial sequence
  plasmid pDAB108208
aattacaacggtatatatcctgccagtcagcatcatcacaccaaaagttaggcccgaatagtttgaaattagaaagctcgcaattgaggtctacaggccaaattcgctcttagccgtacaatattactcaccggatcctaaccggtttaattaaggcgcgccatgcccgggcaagcggccgcacaagtttgtacaaaaaagcaggcttctagacctaggtggagtcatcacgcagactatctcagcatgtgcgtagcacgcggccgcatcagtaagtgcatataaagaaagtaataagtagatgagtttggtaattacatgagatcgacagaggaattacgacgttcttgccatcaaaaagagattccaaatttgtaaagagccatatgtttgttgggcaattgagattgagtcttgccaatccttctttggaagttgacaatttaaaaattcgaagccagatttactcctaattaattattgagcttgaagtcttaattaccgattacatctctgagcagtagtagtcgatgatctttcccggtcactaattttactcaagcgaatcgatttttactttagtttagctaaccgtacgccattacagtttagagagcagcaagggtaagaacattattaaaacataaagtaaacctctcatttattacggtgtagtgctaattacattagcctcaaacatcctaagcttacagttttataaaacacacacgatgactgtgtatagtattaacatacatcaatagcaacactcatgatcatcgtgctaggccgggcttggactgggtgacctaagtgattaagctaactactcagaacgcaagtgagtctgtcgcaatgacagaggcttgaacatcaatgaagagatcaccttgttcgttgtggaactgaagtgcatgtttgtgctggctatgtccaccactctgattggatctgagggtgatgtagaagggtttgtcttgtgggaccggtctgtgttggactatcctctgaatggagttcgggagtgcagcttgtcccagcgttctcctcacccagaccaacattgcttgaaaggcaagatcattgacaaagggatcatgtgcatcagtgtcagttgcaaactctcctctggctgcatctgatccaggaacagcagaacacttggcaacaagctggctcttggtgcagctgagaacgtcatcaatgcctctgaacgcaggaccatgaaagagagtcttgccatcatagactgacccttgcaaagcaggatctgcatcaaggctcggaggctgcatggttgcattggcaggtggagcaccttggttggacaacactatgacagctctgtaggctggaacaagttttccacttgagaacgtcttgagcgtcgcttggacattcaccctcccactcggagcagtggacggtgtgagggtcacttcacagttgacgtctccatcaacagtgacacctttgaagagctgtgcgtcatctatggcccagagagagtagccagggaagagtccaaggcaggtctcagcaaggctcccaatagcaagggtcattggcaacacccttctgccttgtatgacatgatcctccaagaagggattggacttggcactgatctttctatgcagggtgatcgtgtcacttccaactttcttggatggtgtcctccagtttccaacaaggatctcagcaggacttgatcccaacacaatcctcgcaactgtatcagcacctccttcacgaggaatgatctgaactcccatttcttgaaactgtttcttgagttgaggtgtcaccatcccaccatcccagggaccaaagcagatggacttgacactgacatccttcgcaagttccaaacccatcttgttgagagcttcgtttgccatcgcatagtcagactgaccaacattgccgtggaaaccagcaagggagctgaagagaaccatgtgtttgaggttggcacgatcaactgcagccagaagattctccaacccagtgactttggtcccaaagacagcatcaaactcgtcagggagtttcttctctatgagacgatcacggagcacaccagaagcgtgaacgattccactaactctggcaccaagctgggactctgcatccctaactgctttggcaacatctgcagcagagttcacatcacaagagctgtagatcgctttgccacccagagcttcaatggcagcaatggagcttctcacttcacgagcaccaagaacagatcccacaagtttcgtgacagcccttggagtgggtttgggtccttcaccagcactgaaggccctcttcaactcttgggtggcagctttctgcacagccttctcatcagtgatgccagcacaccatgctggttcagacgcagaaactttgctacgacccaacagaatgtacttgcctccagcaatctgacgcgtgatctcacggatgcaaagaggtgtgatcccacgagcacctccagaaaccagaagcacatcgtctttcgctatctgtctctgagggttcccagtctccaacttggcagctctgattgtgcatctttgctggtttgctccaatcccaacctctctgattctgatgtcagcacacgccatctccctaactatggcaactgcagcatcttctgggtgcatcccttgagcaatgtccacaccacggctgaacacatcagattctgaccactccaaccctattgtcttgcagagtccaaagatcgctccacgctgtgctctcttgagtgcgtcagaagtgccttgagaggtgaatccaagtctgccgtcaagcctagccacaccgatgaaggcaggacgacctccagccacagcagtgcagagagaggctttggcaaacttcgcacacatgagtgtgaaacccagtatctcagctggttcaaacctttctgcttgctggcttatgaagcctcccaacgctccaaatctttgctcagcctctttgatggccttctcagctgattctgctgaaaggtccttagccagaacatgacgaatggcagctgcaccagctctctgagccaactgcaatccctcaaaggtcaagacaactgcacaggctcccaacaccctcacaagagcaagtgtcaactctgagccatcgtcaacgacaagaactggacggttctccggtctttccagaatcagttcatctggccttctgatgtcaaccacctttgcgtgcatcagtgacaaatcgtcacagtcagcaccatgaactgaatcaatcttcacagctggtgcagcaccggcacttgcaggagcggctgcagccggagcaggggctgatccaccagctatctcagccttcatggcatcgaccacttctccaaccgttctggtccttgacaaagcatcgacatctttggcctcaacgttcagcatggcttgaacctcagaaaggatttccacacgcttgatgctatcaatcccaagctctgtttccaactccatgtctgactctatcatgtcagtctcgtatccagtctttgcagccaaaacctccatcacaacagtttcagctttttcaaggagttcgttgctgacagctggtgccgcggcagcgggagcaggagcggctgcagctggcgcaggagcagaacccccagctatctcagccttcatggcatcaaccacctctcccaccgtccttgttctggaaagagcatcaacatctttggcctccacattcaacatcgcttgaacctcagagaggatttcaacacgtttgatggagtcaattccaagctcggtctccagttccatgtcagattcaatcatgtcggtctcatagccagttttcgcagcaaggacttccatcacaactgtctcagccttttccaggagttctgaggagacggccggtgcggctgcagctggagccggtgccgcggctgcgggtgcaggagcggctgcagctggcgcaggcgcggaacttccagcgatctccgccttcatcgcatcaacgacctcaccaactgttctggtccttgagagggcatccacatccttagcctccacattgagcattgcttggacttcactgaggatctcaacacgcttgatgctgtcaatgcccaattccgtctcaagttccatgtcagactcaatcatgtcagtctcatagccggtttttgcagccagcacttccatgacaactgtttcagccttctcaagcaattcgttgctgacagctggtgccgcggctgcgggtgcaggtgcggcagctgccggcgcaggagcagagcctccagcaatctcagccttcatcgcatcgacaacttcccccacagttcttgtcctactgagtgcatcaacatctttagcctcaacgttgagcatggcttgcacctcagagaggatctccactctcttgatggaatctattccaagttcggtctccaattccatgtctgactcaatcatgtccgtttcgtaaccagtttttgcagcaaggacttccatcacaactgtttcggctttctccagcaactcattgctgacggcaggagcggctgcagctggagcaggtgccgcggcagcaggtgcaggtgcggctgcagctggcgcactagcagagcttccggcaatttcagccttcatggcgtccacgacctcaccgactgttctggttcttgaaagcgcatcgacatcttttgcctccacgttcaacatagcttggacctcagacaagatttcaacacgtttgatgctatctattcccaactcggtttcaagctccatgtcactttcaatcatgtcggtctcgtaaccagtcttagctgcgagcacctccatcacaaccgtctcggccttttccaggagttcggatgaaacagctggcgcgggcgcggccggtgctggtgcagctggagctggagctgcggctgccggtgcaggtgccgcggcagctggcgcaggcgcgctccctccagcaatctccgccttcatggcatccacaacctcacccactgtccttgttcttgaaagtgcatcaacatccttagcttcaacattgagcatggcttggacttcactcaggatctccactcttttgatggaatcgatcccaagctctgtctccaattccatatcagattcaatcatgtcggtctcatagccagtctttgcagccaaaacctccatcacaaccgtctcagccttctccaagagttctgaagaaacggcaggtgcaggtgcagctggagcaggtgccgcggctgcgggtgcaggagcggctgcagctggcgcgggcgcagaccctccagcaatttcagccttcatggcatccacaacctcaccaacggtcctcgttctggacagagcatcaacatccttcgcttccacgttcagcatagcttggacctcactgaggatttcaacacgtttgatgctgtctatcccaagttctgtctccaattccatgtcagactcaatcatgtcagtctcatagccggttttagctgccaagacctccatcacgacggtctcagctttttcaaggagttcgtttgagacggccggagcggctgcagctggagctggagccgcggcagcgggaccaggagcggcagcggccggcgcaggagcggagcctccagctatctcagccttcatggcattgacaacctcaccgacagttctggtccttgagagagcatccacatccttagcttccacattgagcatggcttggacttcactgaggatttccacacgcttgatggaatcaattccaagctccgtctcaagctccatgtctgattctatcatgtcagtttcgtagccagttttggcagcaaggacttccatcacaacagtttctgccttttcgagcagctcattagaaacagctggtgcagctgcagctggagccgctttagccggtgcaggtgcggcagctgccggcgccggagcggaagaaccagcgatttctgccttcatagcgttgacaacttcacccactgttctcgtcctagagagagcatcaacatctttcgcctcaacgttaagcatagcttggacttcagaaagaatttcaaccctcttgatgctgtcaattcccaactcagtctcaagctccatgtccgcctcaatcatgtctgtttcgtatccagtcttggcagcgagaacctccatcacaactgtctcagctttctcaagcaactcgttggacacggcgggagcaggagcacttgcaacgggagcggcaggggcagcggctttaacaggcgccggagcagtctgttgctgttgctgttgctgaagggaagaagcatcaacacttccataaccatccagctcagccagcatggacttgaggatggcacgatgtttctccacaacagcagtgtcaactgcaggcttggctgaagctgcagcagtcttggcttcctccttggcagcagcaagtttggagttggcttctgcagctgcacgtttggcgtcgtcaagctgcctctgagcgtcttgaagctccttctgaagcctttcagcctccctcttggcagcttcgtcaaccacaggttcaggagccttgatgagtggtgcagcacccttgaggtatgtgacacatcttccgtcgttcatggcagcatccctcactttcttggtcttgtcactgacataggtggcagctgaaagtctgagtgtggttctctttttcttgatggcttgcatcctcgtggcatcaggagcatcccacttgtcaaacccttgaagattgacaccagccacaaccagctgaactgcagcatccctcaactgtatgtcagagtccgtgccagaagctgggttcacagacactgtgacaacagacgggtcatctttgagggtttcagaaacaagtttgctgagaacttgtttcggtccaaactcaacaaagattctcgcaccagcttggtgcatgttcctcacttgggtcaggaacttcacagatgaggtcatgtgttgagtgagcatctctctggcatccgtcggataggtctctccagaaacattgctgaagagctttgtttctgctttgggtgtacggaaggaaaccttggatatgacatctttgaaagctgagctggcattttccatctgtggagaatggaaggcagactcacaagcaagaggcacaactctgaacccttccttctgcaatctggcactttcagcttgaatcccttcaacagacccagtaatgacagtctgagacggagagtttgagtttccaagccagacgttggcagcttgaaccttgatgttctctgcgttgggtcctatgacagctgccatgcaacctttgggtgtggcaggtgcatctttgcctcccatgatccttgcccttctgcaaacaagttcaaacaactcatctctgtcaacacaaccagctgcatagagcgcagcaaactcacccaagctgtgtccagctgcaaagtctggagtgaatccagcttccttgaaaatctcaaaggcaccaagagcacatgccagggttgacggctggctgtatgctgtgagtgagattttcttgtgatcttgttctggctcacgttcgtacggtttccttgggtacaggacttgagagactctttcaaagtctttgtcacttccagcaaccttggactgtgcagcgtccattgcagcaatggactgtctgaactgaggccagttcatcgcaacttcactgaacatgtgtgtgtactgagcaccttgtccagagaagagtgcagcaacagcaccattggtggcaatgcctttggcacggaaagaaactccttctctcggaagcctccacgcttctttggtcacatctttggcaaactgagcacatatagcacgaagcgtggagcacgcatcctccgcatctttgaccaagaatcccagtctcgcattggtcgcaggtatgctcccagggaacttgaactgttctccaaacttgacacacttgatgtaggcagtattcttgactgtctcattctccttgatcgcagcttcaaactctttcagctgagcttcacaaaggctctgcaacgcagcaggagttgcagccatcatcaacaccggttgtggacgtttgttgagtctgtacgctgtcgtgtgctctggttcagcctcttccaacactgcatggtagttggcacctccaaagccaaagctggatattccagcacgtctcggaacaccaggtggagggaaccagggtctgttcatcgtgttgatgtagagggatgactcattgatgggagtgttgtcatagagattgggtggattgtccacattgatcgttccaggcaaagtcttgtgtttgagagccatgatgaccttgatcattccagcaagaccagcaacagccttcaaatgaccaatactggacttgatacttccaactgcaactttctctgtgttcccttcaccatacgctttgtcaaacaagttcctcaacgcagtcaactcaatcctatctccaactggagtgccagtcccatgaccctcaaccaaagtgacagtggcagggtcaacgcaggcacgattgtatgcacgtctcaaggcttcctcttgaccactgattgtgggagtgtagatgccagctgctttgccatcacttgagcttgcacaaccacgaatcacagcatgaatctcatcaccatccctcactgcatctgcataacgtttgagcaccaacatggctgatccctcaccaatgagcatccctttcgttttctcatcatacgctctcacacttgggtccgtgctgaacacaggtgtctttgagaaagccatgtacatcccaatggagttgtctgtgcaggttgcaccagtgaccatcatgtcgcagtcaccatagagcagttcatcaatcgcaaccttgactgctatcaaggagcttgcacatgcagcatccacaacgcagttcatgccatccaagttgaatgtgttggtgcatctgccagcagtgacattcccaaggaatccagggaaagagtcaagtctccattctgggaagttcgctttgtacttctccacagccactttgacatcttcctctggcatccccatctttctcaagactttctccacaaccacatagttgagtctgctgtagaactcatgtgaactcttctgtccacctccaatgccaagcacgcatcctatgtttttcttctcctttccaagtgcatcaatcccagcatcttgaagtgcttctttgaccttgagaagtgagatggtctgattcgcatcagaatcttccatctggaacatgttgagaccaaactcacgcgcatcaaagtcatactcaggaatgaaacctcctctcttgcagtagattttgtcctttgtggtcttgactgggtcaaagtacgcagtcacatcaacacgatcctcaggaagatcagacaggcaatcaatgccagcccttatggtctcccatgactctctcaccgtggttccacaaggaagtatggcgctcatgcctatgatcgcaatcctcgtgtccatctcacctcctttctgctcttgcagcctcgctgccatttttggttgtggatccgttttgctatttgtgtatgttttcttgttttggtttgagtttaaccatcattctcttctctctatttatagagagaagaggttggcacgcagcactgcgacatgagagaaagacacgggtgaagaggcgggagctgaggtggcagcatgcatgcatgcatggccagtcgtgtcatagtgagaagaggagaaagctgaggtggcaacgtgtatggccagtggtgtcatagtgtgaaagctgacgtggcagcatgcatggtgagtgtgaaaaaggcgccacagtgcagatgttactgaacaaaagcggtgtgccatgcaacttttgcccatcgtcgtctttctcatccaagttcctctttataatatcttttaccaaatcatattttaatataaattcattttatttttaaataaagtaatattatatccataaatattaactctcatttaacacattttcaaatttaacacttctgtaaataaatttattaacaaaaacttgtaaatatgttcaaataaatccataaatattaactttcattttattaacaaaaaaatctttactataagctgcggccgcttaattaagatgagtgatactcaggactcaggactcactctgctgatcactagtgctagcctcgaggtcgacacaactttgtatacaaaagttgtctaggatctgcttttacatgcgagacacatcttctaaagtaattttaataatagttactatattcaagatttcatatatcaaatactcaatattacttctaaaaaattaattagatataattaaaatattacttttttaattttaagtttaattgttgaatttgtgactattgatttattattctactatgtttaaattgttttatagatagtttaaagtaaatataagtaatgtagtagagtgttagagtgttaccctaaaccataaactataagatttatggtggactaattttcatatatttcttattgcttttaccttttcttggtatgtaagtccgtaactggaattactgtgggttgccatgacactctgtggtcttttggttcatgcatggatcttgcgcaagaaaaagacaaagaacaaagaaaaaagacaaaacagagagacaaaacgcaatcacacaaccaactcaaattagtcactggctgatcaagatcgccgcgtccatgtatgtctaaatgccatgcaaagcaacacgtgcttaacatgcactttaaatggctcacccatctcaacccacacacaaacacattgcctttttcttcatcatcaccacaaccacctgtatatattcattctcttccgccacctcaatttcttcacttcaacacacgtcaacctgcatatgcgtgtcatcccatgcccaaatctccatgcatgttccaaccaccttctctcttatataatacctataaatacctctaatatcactcacttctttcatcatccatccatccagagtactactactctactactataataccccaacccaactcatattcaatactactctaggatccacaaccaaaaatgcttcagcacacttggcttccgaagcctcccaatctgaccctcttgtcagatgaggttcatctctggaggattcctcttgaccagcctgagtcacaacttcaagaccttgctgccaccctgagcagtgatgaattggcgagggcaaacagattctactttccagaacacagaaggcgtttcactgctgggagaggcatcctcagatccatcttgggtggatacttgggagtggaaccgggtcaagtcaagtttgattatgagtcccgtgggaaaccgatccttggtgacagatttgctgagagtggactcctgttcaacttgtctcacagccagaaccttgccttgtgtgctgtcaactacacgcgtcaaataggcattgatcttgaatatctgcgtccaacatctgacttggagtctcttgcaaagaggttctttctcccaagagaatatgaactcttgaggtcactccctgatgagcagaaacagaagattttctttcgttactggacttgcaaagaggcttatctcaaagcaacgggagatggaatagccaaacttgaagagatcgagatagcactcaccccaacagaacctgccaagctccaaacagctcctgcgtggtctctgttggagcttgtgccagatgacaattgtgttgcagctgtggctgttgcgggttttggttggcagcccaagttctggcattactgagtagttagcttaatcacttaggtcaccagtatgaactaaaatgcatgtaggtgtaagagctcatggagagcatggaatattgtatccgaccatgtaacagtataataactgagctccatctcacttcttctatgaataaacaaaggatgttatgatatattaacactctatctatgcaccttattgttctatgataaatttcctcttattattataaatcatctgaatcgtgacggcttatggaatgcttcaaatagtacaaaaacaaatgtgtactataagactttctaaacaattctaactttagcattgtgaacgagacataagtgttaagaagacataacaattataatggaagaagtttgtctccatttatatattatatattacccacttatgtattatattaggatgttaaggagacataacaattataaagagagaagtttgtatccatttatatattatatactacccatttatatattatacttatccacttatttaatgtctttataaggtttgatccatgatatttctaatattttagttgatatgtatatgaaaaggtactatttgaactctcttactctgtataaaggttggatcatccttaaagtgggtctatttaattttattgcttcttacagataaaaaaaaaattatgagttggtttgataaaatattgaaggatttaaaataataataaataataaataacatataatatatgtatataaatttattataatataacatttatctataaaaaagtaaatattgtcataaatctatacaatcgtttagccttgctggaacgaatctcaattatttaaacgagagtaaacatatttgactttttggttatttaacaaattattatttaacactatatgaaattttttttttttatcagcaaagaataaaattaaattaagaaggacaatggtgtcccaatccttatacaaccaacttccacaagaaagtcaagtcagagacaacaaaaaaacaagcaaaggaaattttttaatttgagttgtcttgtttgctgcataatttatgcagtaaaacactacacataacccttttagcagtagagcaatggttgaccgtgtgcttagcttcttttattttatttttttatcagcaaagaataaataaaataaaatgagacacttcagggatgtttcaacccttatacaaaaccccaaaaacaagtttcctagcaccctaccaacgaattcggtcacctcgagtatcaaaatctatttagaaatacacaatattttgttgcaggcttgctggagaatcgatctgctatcataaaaattacaaaaaaattttatttgcctcaattattttaggattggtattaaggacgcttaaattatttgtcgggtcactacgcatcattgtgattgagaagatcagcgatacgaaatattcgtagtactatcgataatttatttgaaaattcataagaaaagcaaacgttacatgaattgatgaaacaatacaaagacagataaagccacgcacatttaggatattggccgagattactgaatattgagtaagatcacggaatttctgacaggagcatgtcttcaattcagcccaaatggcagttgaaatactcaaaccgccccatatgcaggagcggatcattcattgtttgtttggttgcctttgccaacatgggagtccaaggttggcgcgccgaattcgcggccgcttaattaactactgtcactgaggccgtagacgagtacggactgatctaactagtgctagcctcgaggtcgaccaacttttctatacaaagttgtctagacctaggactaggcactgagtgactcactgacctgactgagtgactggcggccgcatcagtaagtgcatataaagaaagtaataagtagatgagtttggtaattacatgagatcgacagaggaattacgacgttcttgccatcaaaaagagattccaaatttgtaaagagccatatgtttgttgggcaattgagattgagtcttgccaatccttctttggaagttgacaatttaaaaattcgaagccagatttactcctaattaattattgagcttgaagtcttaattaccgattacatctctgagcagtagtagtcgatgatctttcccggtcactaattttactcaagcgaatcgatttttactttagtttagctaaccgtacgccattacagtttagagagcagcaagggtaagaacattattaaaacataaagtaaacctctcatttattacggtgtagtgctaattacattagcctcaaacatcctaagcttacagttttataaaacacacacgatgactgtgtatagtattaacatacatcaatagcaacactcatgatcatcgtgctaggccgggcttggactgggtgacctaagtgattaagctaactactcaaagcgcattcgttggctcatagacaaaggcagcatcttcagtctcaagatcaatcctcggatcatttctcagagcattaagacgcctcaggtaacatgcaccacgcaaaatctgaaggttgatctggacaacacatgggtactcattagagacagcaggatcaagatatgttcctttgatgaagtcattgaaggctccaatggctggaccacaccagacttgatagtccatgacacgatcaggagcacccatgttggcccaacgtgatgcaagaccaagataccatctgaaacacaaagacatcttgagtttggggtcatgttccgctctctgtatcttctctggattcttcaaaccattgatgtaaaagtccttggtctcttcccagacctcttgaagtgccctcttgaagatcctcttctcgatcctttcaagttcagcaggaggcattgaatcgaaagagtcgtacttgcaaaagagttcgtacaatttgttagctcttgatgggaacattgttcccttcttgagaacttggagtttcacaccttcctcaaacatatcagctgctggagccatgcaaatgtcactgtaggtggcttgactgagttgttttctcacgttgtcacatgtcccggactgtttagcaacttgattgacagtcccagtcactatgaaggcagctcccattgtgagggcagccgcagcagcttgtgggcagccaacaccgcctccagctccaactctgactctaaggtgcgcaggataaccacactctctgtgcagtctgttcctaaggttgatgatcaaaggcaagatgacgtggatgggacggttgtcagtgtgaccaccagaatcagcttcaacagcgatgtcgtctgcgacaggaacacgacgggcaagttcggcttgttcttgtgttatctcaccagaagctatgagtttctcaaggaggtgttccggagccggtctgatgaacatttcggcgagttctgttctggacacttttccaatgatacggtttctgatgttgacactcccatcagcgttccttgagagtccggctgcacggtaacgaacaacttggggagtgagggtcatgaatgcagaagcctccaccacagtaacgcccttttcgaggaagagatcaacattccccttttccaagttgctgtcaaaaggtgaatgaatgaggttcacagcatatggtccttgaggcagagccgcttgtatcttctccaaagctgccctcacatggtgcattggaagcccacccgctccaaaagaacccaatatcttcctcttcccagcagcaatgacaaggtccgcagacgcaattcccttggccattgctccagtgtacagaggtgctgacacattgtacgtttccatgaaggacttgtcaccaagatcacttatggagcatggtttgatactgacaatccttgaagaagttgcaggtttggattcaaactgcaccaaattggagttttcaacaccaagatacaatggattgtccacttcaagcaggacatctctcaactgagtcggactgagtgcaactccagttttcccagggtccgcttttgcgctgggtggctgttgttgaacatccggaatggcttgaggttttgcactgacaacacgaactctgagttctttggcttcatacacacggagaccatcaacccaaagtgctccatctgccactatgtcaacgtagcctccattttcaggagaggctgtgattgaaactatgtgcacctcacagtccatcgcacggttctttggtgtcaattgaccacggtacttccacgccgtttttccaggggcatgggcaaaggtcggattgctcacattgtattctcccggtatgttctggtccaccgcaaatgcctcaatgagctggaacattgactcaattcccaaagatccaggcatcacaggatcaaaccaaaagtgacaagagaagaaccagtcttgtgggttaacatctttgtgtccatgcgcatatcctttcccatgcagcccagaatcaggagcaatgttgaggtaatccaaatactcacactgttctgaccttctgagaacttgagcattagttgcatctggaagtttctcagtcagctgttctttgcctttggctgatgcgatttcaactcttctcacactcgtgttgttagttttgcaccaaggctccgtctttttcccattgtcaagtccagcttgctgagcaaacacctctggagtgaaccatccaaaggaagtgcttcctttgtagaaaaccacgccatcaacagacaactcaaacgtgaatctgtgaatccccatctttcccaacattgcatatccagtgcacttggtcacattccttatggttttccccctcacatccacatctggcctcaccatttcagcacttgcatcaaggttcctaaagagaatgtcatctttgtccatcgtcagtggtgctttcaacacactggtgagaacaccggatgtctgaagtccgatttccatgatgatggaataaggcatgtgcccatcattgcaagaaccatcaaagaaccacgcatcttgaggacagtcaaactcccccaccattgtgcctttgctgggattgcaatcaacattcaggaacttgccatgttccatgtttgtgacttcaacaactctagtcacaagagccaaatcaaaagcagggcttctgctcgtatttgacttatcaaatcttgcgaactctggtcccaagcagttgctaacttttccacacatgaactctgacatgttgtaccagttcagaggcatttctccagctttgcaattgttgtcaagtgggttgccagggaaagggatgaagcaaattgccctcggagggtaagaactaggggagaagaacggcgtcgggttgccaggaagttttgacatgggatgccaggacatttctttcggagcgagagcgtcacccttgaggatatgttcaggaagtgcaactggctttggcgcaagaacatctgctgagaaagcaggcttcgcaggggcagcagaagcactagcactggcaccagagctggccttggacgcttccggtcccacagtggctgcaccgttagcaaaaacgggctgaactttggaggggttcttgttcgtggatctcttctgcatcttgagagcaatgcccttgaagtccacgacgatctttttgttaagatccccctttccgtagtcgctgattctatcaaggctgaaatcttgacccttttcgaaatcaacgtcaatgatgttgacgtcagcaatggcgtacggatcgttatcctcgtcgaatcccatctctttgatctccatgacgtagaccaactttcccttatgaggagatatctgacccctacacctaactttgttcgggtgtccgttgacgggtctgaagtcaaatggtccggtggtaaggtgcaaaccgagccagatcatgtacatcttgagcatttgtgaacaaccgtcgctgacaagagatccagccatgacttgatccttaacaaaatggcatgggaagtaccaatggtccctctccaagattttctcaccaaccaactgacccaaaccgtacacacctcccttatggtcaatgctggtgactctatcaatcatgagcatcttacgtgcgcagagtttgtagttgatctccggcatgccattctttgagccaaaaacggaagcccaatctttgtcaaccaaggtctgcatctccttttcgttgagttttgttttgtgaaggcagggagcgacagcatagggagaaacatcttgctttggaatcttagctctggcagccaaatcccctcttgtgaacaccacaccctttcccgcatcaagctcctcatttgtgaagaagccagcacagccatctctcatctcaatgagaagcctcccattgacatagcagtcatactcaaagaagaacatggagatgccaccatccaaacgtttggcaaaaccggtcactctgatgtcatactcaagggtctctccctcatgggcaaccccatagaatgtcaacgtggtgttgagcagacggtaaactctgtcaccttggttctggaaatcaattcccatgtatgatatcagcatcaaatcgcactgtccactctcaaccagaactgcccagggacaatcacctccctcagacaattcgccattcactggaagatcatactcagtgaccattctggcaccaactctgtagttgttgacctcggcatccatgagtgtgacccttgtcacaagcaggtattcacgagcaggcagcctcacccttctggggtacttgtctatgacagcaaactccggaccaaaaaccttagctatgtcaccctctgcaaactccaggagttcctcatagttgaacacctcagttttgccagaggtcagttcctccttggtcatctcccaacatggcttcttgttggtcttgacacgaagcgccatttttggttgtggatccgttttgctatttgtgtatgttttcttgttttggtttgagtttaaccatcattctcttctctctatttatagagagaagaggttggcacgcagcactgcgacatgagagaaagacacgggtgaagaggcgggagctgaggtggcagcatgcatgcatgcatggccagtcgtgtcatagtgagaagaggagaaagctgaggtggcaacgtgtatggccagtggtgtcatagtgtgaaagctgacgtggcagcatgcatggtgagtgtgaaaaaggcgccacagtgcagatgttactgaacaaaagcggtgtgccatgcaacttttgcccatcgtcgtctttctcatccaagttcctctttataatatcttttaccaaatcatattttaatataaattcattttatttttaaataaagtaatattatatccataaatattaactctcatttaacacattttcaaatttaacacttctgtaaataaatttattaacaaaaacttgtaaatatgttcaaataaatccataaatattaactttcattttattaacaaaaaaatctttactataagctgcggccgcttaattaatcacgagtggatgactgtcacgactgactcatgactgactactagtgctagcctcgaggtcgacacaactttgtataataaagttgtctagtctgcttttacatgcgagacacatcttctaaagtaattttaataatagttactatattcaagatttcatatatcaaatactcaatattacttctaaaaaattaattagatataattaaaatattacttttttaattttaagtttaattgttgaatttgtgactattgatttattattctactatgtttaaattgttttatagatagtttaaagtaaatataagtaatgtagtagagtgttagagtgttaccctaaaccataaactataagatttatggtggactaattttcatatatttcttattgcttttaccttttcttggtatgtaagtccgtaactggaattactgtgggttgccatgacactctgtggtcttttggttcatgcatggatcttgcgcaagaaaaagacaaagaacaaagaaaaaagacaaaacagagagacaaaacgcaatcacacaaccaactcaaattagtcactggctgatcaagatcgccgcgtccatgtatgtctaaatgccatgcaaagcaacacgtgcttaacatgcactttaaatggctcacccatctcaacccacacacaaacacattgcctttttcttcatcatcaccacaaccacctgtatatattcattctcttccgccacctcaatttcttcacttcaacacacgtcaacctgcatatgcgtgtcatcccatgcccaaatctccatgcatgttccaaccaccttctctcttatataatacctataaatacctctaatatcactcacttctttcatcatccatccatccagagtactactactctactactataataccccaacccaactcatattcaatactactctaggatccacaaccaaaaatggctgcaaggaacgtgagtgcggctcatgagatgcatgacgagaagaggatagctgttgtgggcatggctgttcagtatgctggatgcaaaacgaaagacgagttctgggaagttctcatgaatggaaaagttgagagcaaagtgatcagcgacaaacgtcttggttcaaattaccgtgctgaacactacaaagctgaaaggagcaagtatgctgacaccttctgcaatgagacatatggaactcttgatgagaacgaaatagacaatgagcatgaactccttttgaaccttgccaaacaagccttggctgaaacatctgtcaaagattcaacaagatgtggcatagtttctggatgcctcagcttcccgatggacaacctccaaggtgaactcttgaatgtgtaccagaaccatgttgagaagaaacttggtgccagagttttcaaagatgcctctcactggtcagaaagagaacagtccaacaaaccagaggctggtgacagaagaatcttcatggaccctgcttcctttgttgctgaggaactcaatcttggcgctctccactactctgttgatgctgcctgtgccactgcgctctatgtgctcagactggcgcaagatcacttggtctctggtgcagctgatgtgatgctttgtggtgcaacatgcctgccggagccgtttttcatactctctgggttctcaaccttccaagccatgcctgttggaacgggtcagaatgtgtccatgccgctgcacaaagattctcaaggattgacccctggtgaaggaggttccatcatggtcctcaaacgtttggatgacgcaatcagagatggagatcacatctatggaacacttttgggagccaatgtcagcaacagtggcactggtctgccacttaaaccccttttgccgtcagagaaaaagtgcctcatggacacctacacacgtatcaatgtgcatccccacaagattcagtatgttgaatgccatgcaactgggactccacaaggtgatcgtgtggaaattgatgctgtgaaggcttgctttgaaggcaaagtcccacgttttggaaccacaaaagggaactttggacacacattggtggcagctgggtttgctggcatgtgcaaagtgcttctctccatgaagcacgggatcattccacccactccgggaatagatgacgaaacgaagatggaccctctggttgtctctggtgaggccattccctggccagaaacgaatggagaaccgaagcgtgctggtctctcagcgtttggatttggtgggaccaatgctcatgctgtctttgaggaacatgacccaagcaatgctgcatgcactggccatgactccatttctgctctctctgcacgttgtggtggtgagtcaaacatgagaatagcaatcactgggatggatgccacttttggtgctttgaaaggattggatgcttttgaaagggccatctacactggtgctcatggtgctataccactcccagaaaagagatggagattcctggggaaagacaaggacttccttgatctttgtggagtcaaagcaacaccgcatggctgttacattgaagatgttgaagttgatttccagaggctgaggactccaatgactcctgaagatatgctcttgcctcaacagcttctggctgtcaccacaattgatagggccatattggactctggcatgaagaaaggtggaaatgtggctgtctttgtggggttggggaccgatcttgaactctaccgtcaccgtgcaagggttgctctcaaggagagagtgaggcctgaagccagcaagaaactcaatgacatgatgcagtacatcaatgattgtgggacaagcacttcttacaccagctacataggcaacttggttgcaacaagggtcagttcacaatggggcttcacgggaccttccttcacaatcacagaaggcaacaattctgtgtacagatgtgctgaacttggcaaatacctcttggaaacgggagaggttgatggggttgtggttgcgggtgttgatctctgtgggagtgctgagaacctttacgtcaagtcaaggcgtttcaaggtgtctacatctgacaccccgagagccagctttgatgcagctgctgatggttactttgttggagagggctgtggtgcatttgtgctcaagcgtgagacaagctgcaccaaggatgacagaatctatgcttgcatggatgccatagttcctggaaatgttccatctgcatgtttgagagaggcattggatcaagccagagtcaagcctggagacatcgagatgttggagctttctgctgattcagcgaggcatttgaaggacccgtctgttctcccaaaggaactcactgctgaggaagagattggcggacttcagacgattcttcgtgacgatgacaagctcccaaggaatgttgcaactggaagtgtcaaggccactgttggtgacactggttatgcttctggtgctgccagtttgattaaggctgcgctttgcatctacaaccgttacctgcccagcaatggagatgactgggatgaacctgcacctgaagcaccctgggacagcacactctttgcgtgccagacctcaagagcttggttgaagaaccctggtgagagacgttatgcggctgtttccggagtcagtgaaaccagaagttgctacagtgtgctgctttctgaagcagagggacactacgagagagagaacagaatcagtttggatgaggaagcacccaagctcattgtgttgagagcagactcccatgaagagattcttggaagattggacaagataagggaaaggttcttgcagcccacgggtgctgcacccagagagtctgaattgaaggcgcaagcccgtaggatctttcttgaactccttggtgagacccttgcccaagatgcagcttcatctggaagtcagaagccccttgctctcagcttggtctccactccatccaagctccagagagaggtggaacttgcggcaaaaggcattccgagatgtctcaagatgagacgtgattggagttcccctgctggaagcagatatgcgcctgagcctttggccagtgacagagttgccttcatgtatggagaaggaaggagcccttactatggcatcacacaagacattcataggatttggcctgaacttcatgaggtcatcaatgagaaaacaaaccgtctctgggctgaaggtgacagatgggtcatgccaagggccagcttcaagagtgagcttgagtcacaacagcaagagtttgacagaaacatgattgaaatgttccgtcttggaatcctcacctcaattgccttcacaaacctggcgagagatgttctcaacatcacgcccaaagcagcctttggactcagtttgggagagatttccatgatctttgctttctccaagaaaaacggtttgataagcgatcagttgacaaaggatttgagagagtcagatgtctggaacaaagctctggctgttgagttcaatgcgctcagagaagcctggggcattccacagtctgtcccaaaagatgagttctggcaaggttacatagtgaggggaacgaaacaagacatagaagcagccatagcaccagactcaaagtatgtgaggttgaccatcatcaatgatgccaacactgctctcatcagtggaaagcctgatgcatgcaaagctgcgattgctcgtcttggtggcaacatccctgcgcttccagtcactcaaggcatgtgtgggcattgcccagaggtgggaccttacaccaaggacatcgcaaagatccacgccaaccttgagttccctgtggttgatggtcttgatctctggactaccataaaccagaagaggcttgtgccaagagccacgggtgccaaagatgaatgggctccttcatcctttggggagtatgctggacagctctatgagaaacaagccaacttccctcagatagttgaaaccatctacaagcagaactatgatgtgtttgttgaagttgggccaaacaatcacagaagcacagcagtgagaaccacgcttggaccacagagaaaccaccttgctggtgccatagacaagcagaacgaggatgcttggacgacaatagtcaagctcgtggcttcattgaaggctcaccttgttcctggagtgaccatcagtccgctctaccactccaagctcgttgcagaggctgaggcttgttatgctgcgctctgtaaaggtgagaaacccaagaaaaacaagtttgtgagaaagattcagttgaatggcagattcaacagcaaggcagaccccatctcctcagcagaccttgcatccttcccacctgcggaccctgcgattgaagctgccatctcttcaaggatcatgaagcctgtggctccgaaattctatgcgcgtctcaacattgatgagcaagatgagaccagagatccgatcttgaacaaggacaatgcgccttccagctccagctcttccagcagttcctcttccagcagttcatctccgtctcctgctccttcagctccagttcagaagaaagctgccccagctgcggagacaaaagctgttgccagtgctgatgcacttcgtagtgccctgcttgatcttgactccatgcttgcgctcagctctgcaagtgcttctggcaaccttgttgagactgcgccatctgatgccagtgtcattgtccctccgtgcaacattgctgatcttggcagcagagctttcatgaaaacttatggtgtttctgcgcctctgtacaccggtgcaatggccaagggaattgcctctgcggacttggtgatcgcagctggaaggcaaggaatccttgcgtcatttggtgctggaggccttccaatgcaagttgtgcgtgagtccattgaaaagattcaagctgccctgcccaatggaccatatgctgtcaacctcatccattctccttttgacagcaaccttgagaagggaaatgttgatctcttcttggaaaagggtgtcacttttgttgaggcttcagccttcatgacgttgacaccgcaagttgtcagatacagagcggctgggttgacgaggaatgcagatgggtcagtcaacataaggaacagaatcattgggaaagtctccagaactgagctggctgaaatgttcatgcgtcctgcacctgagcatcttttgcagaagctcattgcttctggggagatcaatcaagaacaagctgagttggccagacgtgttcctgtggctgatgacattgcggttgaagctgattctggtggacacactgacaaccgtccaatccatgtcattctgcctctgattatcaacctgagggataggcttcacagagagtgtggatacccagcaaacctgagggttcgtgttggtgctgggggtggcattgggtgtccccaagctgcgctggcaactttcaacatgggtgcctctttcattgtcactggaacagtgaaccaagttgccaaacaatctgggacgtgtgacaatgtgaggaaacagcttgcgaaagcaacttactcagatgtttgcatggcaccggcagctgacatgtttgaggaaggtgtgaaacttcaagttttgaagaaaggaacaatgttcccttcaagagccaacaaactctatgagttgttctgcaagtatgattcttttgagtccatgcctccagcagagcttgcgagggttgagaaaagaatcttcagtcgtgcattggaagaggtctgggatgagaccaagaacttctacatcaaccgtctccacaacccagagaagatacagagggctgagagggaccccaaactgaagatgtcactgtgtttcagatggtatctgtccctggcttcaaggtgggccaacactggagcttctgacagagtcatggactaccaagtttggtgtggtcctgccattggttcattcaatgatttcatcaaaggaacttaccttgatccggcagtggcaaatgagtacccgtgtgttgtgcagatcaacaaacagattcttagaggagcgtgcttcttgaggcgtcttgaaatactgagaaatgcaaggctttcagatggtgcagctgcacttgtggcgagcattgatgacacatatgtccctgctgagaagctgtgagtagttagcttaatcacttaggtcacctcgagtatcaaaatctatttagaaatacacaatattttgttgcaggcttgctggagaatcgatctgctatcataaaaattacaaaaaaattttatttgcctcaattattttaggattggtattaaggacgcttaaattatttgtcgggtcactacgcatcattgtgattgagaagatcagcgatacgaaatattcgtagtactatcgataatttatttgaaaattcataagaaaagcaaacgttacatgaattgatgaaacaatacaaagacagataaagccacgcacatttaggatattggccgagattactgaatattgagtaagatcacggaatttctgacaggagcatgtcttcaattcagcccaaatggcagttgaaatactcaaaccgccccatatgcaggagcggatcattcattgtttgtttggttgcctttgccaacatgggagtccaaggttggcgcgccgaattcgcggccgcttaattaatctgacctgaccactagacctgagtgagtacagatgtgctactagtgctagcctcgaggtcgacacccagctttcttgtacaaagtggttgcggccgcttaattaaatttaaattcaattaatgcaatcttgattttcaacaacgaaggtaatggcgtaaaagaaaaaatgtatgttattgtattgatctttcatgatgttgaagcgtgccataatatgatgatgtataattaaaatattaactgtcgcattttattgaaatggcactgttatttcaaccatatctttgattctgttacatgacacgactgcaagaagtaaataatagacgccgttgttaaagaattgctatcatatgtgcctaactagagggaatttgagcgtcagacctaatcaaatattacaaaatatctcactctgtcgccagcaatggtgtaatcagcgcagacaaatggcgtaaagatcgcggaaaaacctccccgagtggcatgatagctgcctctgtattgctgatttagtcagccttatttgacttaagggtgccctcgttagtgacaaattgctttcaaggagacagccatgccccacactttgttgaaaaacaaattgcctttggggagacggtaaagccagttgctcttcaataaggaatgtcgaggaggcaatgtaaccgcctctggtagtacacttctctaatccaaaaatcaatttgtattcaagataccgcaaaaaacttatggtttaaaccctgcaggactagtccagaaggtaattatccaagatgtagcatcaagaatccaatgtttacgggaaaaactatggaagtattatgtaagctcagcaagaagcagatcaatatgcggcacatatgcaacctatgttcaaaaatgaagaatgtacagatacaagatcctatactgccagaatacgaagaagaatacgtagaaattgaaaaagaagaaccaggcgaagaaaagaatcttgaagacgtaagcactgacgacaacaatgaaaagaagaagataaggtcggtgattgtgaaagagacatagaggacacatgtaaggtggaaaatgtaagggcggaaagtaaccttatcacaaaggaatcttatcccccactacttatccttttatatttttccgtgtcatttttgcccttgagttttcctatataaggaaccaagttcggcatttgtgaaaacaagaaaaaatttggtgtaagctattttctttgaagtactgaggatacaacttcagagaaatttgtaagtttgtaggtaccagatctggatcccaaaccatgtctccggagaggagaccagttgagattaggccagctacagcagctgatatggccgcggtttgtgatatcgttaaccattacattgagacgtctacagtgaactttaggacagagccacaaacaccacaagagtggattgatgatctagagaggttgcaagatagatacccttggttggttgctgaggttgagggtgttgtggctggtattgcttacgctgggccctggaaggctaggaacgcttacgattggacagttgagagtactgtttacgtgtcacataggcatcaaaggttgggcctaggatctacattgtacacacatttgcttaagtctatggaggcgcaaggttttaagtctgtggttgctgttataggccttccaaacgatccatctgttaggttgcatgaggctttgggatacacagcccggggtacattgcgcgcagctggatacaagcatggtggatggcatgatgttggtttttggcaaagggattttgagttgccagctcctccaaggccagttaggccagttacccaaatctgagtagttagcttaatcacctagagctcgatcggcggcaatagcttcttagcgccatcccgggttgatcctatctgtgttgaaatagttgcggtgggcaaggctctctttcagaaagacaggcggccaaaggaacccaaggtgaggtgggctatggctctcagttccttgtggaagcgcttggtctaaggtgcagaggtgttagcgggatgaagcaaaagtgtccgattgtaacaagatatgttgatcctacgtaaggatattaaagtatgtattcatcactaatataatcagtgtattccaatatgtactacgatttccaatgtctttattgtcgccgtatgtaatcggcgtcacaaaataatccccggtgactttcttttaatccaggatgaaataatatgttattataatttttgcgatttggtccgttataggaattgaagtgtgcttgaggtcggtcgccaccactcccatttcataattttacatgtatttgaaaaataaaaatttatggtattcaatttaaacacgtatacttgtaaagaatgatatcttgaaagaaatatagtttaaatatttattgataaaataacaagtcaggtattatagtccaagcaaaaacataaatttattgatgcaagtttaaattcagaaatatttcaataactgattatatcagctggtacattgccgtagatgaaagactgagtgcgatattatggtgtaatacataggaattcgtttaaacgatctgcgtctaattttcggtccaacttgcacaggaaagacgtcgaccgcggtagctcttgcccagcagactgggcttccagtcctttcgctcgatcgggtccaatgttgtcctcagctgtgaaccggaagcggacgaccaacagtggaagaactgaaaggaacgagccgtctataccttgatgatcggcctctggtgaagggtatcatcgcagccaagcaagctcatgaaaggctgatgggggaggtgtataattatgaggcccacggcgggcttattctttagggaggatctatctcgttgctcaagtgcatggcgcaaagcagttattggagtgcggattttcgttggcatattattcgccacgagttagcagacgaagagaccttcatgaacgtggccaaggccagagttaagcagatgttacgccctgctgcaggcctttctattatccaatagttggttgatctttggaaagagcctcggctgaggcccatactgaaagagatcgatggatatcgatatgccatgttgtttgctagccagaaccagatcacatccgatatgctattgcagcttgacgcagatatggaggataagttgattcatgggatcgctcaggagtagctcatccatgcacgccgacaagaacagaaattccgtcgagttaacgcagccgcttacgacggattcgaaggtcatccattcggaatgtattagtttgcaccagctccgcgtcacacctgtcttcatttgaataagatgttagcaattgtttttagctttgtcttgttgtggcagggcggcaagtgcttcagacatcattctgttttcaaattttatgctggagaacagcttcttaattcctttggaaataatagactgcgtcttaaaattcagatgtctggatatagatatgattgtaaaataacctatttaagtgtcatttagaacataagttttatgaatgttcttccattttcgtcatcgaacgaataagagtaaatacaccttttttaacattacaaataagttcttatacgttgtttatacaccgggaatcatttccattattttcgcgcaaaagtcacggatattcgtgaaagcgacataaactgcgaaatttgcggggagtgtcttgagtttgcctcgaggctagcgcatgcacatagacacacacatcatctcattgatgcttggtaataattgtcattagattgtttttatgcatagatgcactcgaaatcagccaattttagacaagtatcaaacggatgtgacttcagtacattaaaaacgtccgcaatgtgttattaagttgtctaagcgtcaatttgatttacaattgaatatatcctgccccagccagccaacagctcgatttacaattgaatatatcctgccggccggcccacgcgtgtcgaggaattctgatctggcccccatttggacgtgaatgtagacacgtcgaaataaagatttccgaattagaataatttgtttattgctttcgcctataaatacgacggatcgtaatttgtcgttttatcaaaatgtactttcattttataataacgctgcggacatctacatttttgaattgaaaaaaaattggtaattactctttctttttctccatattgaccatcatactcattgctgatccatgtagatttcccggacatgaagccatttacaattgaatatatcctgccgccgctgccgctttgcacccggtggagcttgcatgttggtttctacgcagaactgagccggttaggcagataatttccattgagaactgagccatgtgcaccttccccccaacacggtgagcgacggggcaacggagtgatccacatgggacttttaaacatcatccgtcggatggcgttgcgagagaagcagtcgatccgtgagatcagccgacgcaccgggcaggcgcgcaacacgatcgcaaagtatttgaacgcaggtacaatcgagccgacgttcacgcggaacgaccaagcaagcttggctgccatttttggggtgaggccgttcgcggccgaggggcgcagcccctggggggatgggaggcccgcgttagcgggccgggagggttcgagaagggggggcaccccccttcggcgtgcgcggtcacgcgcacagggcgcagccctggttaaaaacaaggtttataaatattggtttaaaagcaggttaaaagacaggttagcggtggccgaaaaacgggcggaaacccttgcaaatgctggattttctgcctgtggacagcccctcaaatgtcaataggtgcgcccctcatctgtcagcactctgcccctcaagtgtcaaggatcgcgcccctcatctgtcagtagtcgcgcccctcaagtgtcaataccgcagggcacttatccccaggcttgtccacatcatctgtgggaaactcgcgtaaaatcaggcgttttcgccgatttgcgaggctggccagctccacgtcgccggccgaaatcgagcctgcccctcatctgtcaacgccgcgccgggtgagtcggcccctcaagtgtcaacgtccgcccctcatctgtcagtgagggccaagttttccgcgaggtatccacaacgccggcggccgcggtgtctcgcacacggcttcgacggcgtttctggcgcgtttgcagggccatagacggccgccagcccagcggcgagggcaaccagcccggtgagcgtcggaaagggtcgacggatcttttccgctgcataaccctgcttcggggtcattatagcgattttttcggtatatccatcctttttcgcacgatatacaggattttgccaaagggttcgtgtagactttccttggtgtatccaacggcgtcagccgggcaggataggtgaagtaggcccacccgcgagcgggtgttccttcttcactgtcccttattcgcacctggcggtgctcaacgggaatcctgctctgcgaggctggccggctaccgccggcgtaacagatgagggcaagcggatggctgatgaaaccaagccaaccaggaagggcagcccacctatcaaggtgtactgccttccagacgaacgaagagcgattgaggaaaaggcggcggcggccggcatgagcctgtcggcctacctgctggccgtcggccagggctacaaaatcacgggcgtcgtggactatgagcacgtccgcgagctggcccgcatcaatggcgacctgggccgcctgggcggcctgctgaaactctggctcaccgacgacccgcgcacggcgcggttcggtgatgccacgatcctcgccctgctggcgaagatcgaagagaagcaggacgagcttggcaaggtcatgatgggcgtggtccgcccgagggcagagccatgacttttttagccgctaaaacggccggggggtgcgcgtgattgccaagcacgtccccatgcgctccatcaagaagagcgacttcgcggagctggtattcgtgcagggcaagattcggaataccaagtacgagaaggacggccagacggtctacgggaccgacttcattgccgataaggtggattatctggacaccaaggcaccaggcgggtcaaatcaggaataagggcacattgccccggcgtgagtcggggcaatcccgcaaggagggtgaatgaatcggacgtttgaccggaaggcatacaggcaagaactgatcgacgcggggttttccgccgaggatgccgaaaccatcgcaagccgcaccgtcatgcgtgcgccccgcgaaaccttccagtccgtcggctcgatggtccagcaagctacggccaagatcgagcgcgacagcgtgcaactggctccccctgccctgcccgcgccatcggccgccgtggagcgttcgcgtcgtctcgaacaggaggcggcaggtttggcgaagtcgatgaccatcgacacgcgaggaactatgacgaccaagaagcgaaaaaccgccggcgaggacctggcaaaacaggtcagcgaggccaagcaggccgcgttgctgaaacacacgaagcagcagatcaaggaaatgcagctttccttgttcgatattgcgccgtggccggacacgatgcgagcgatgccaaacgacacggcccgctctgccctgttcaccacgcgcaacaagaaaatcccgcgcgaggcgctgcaaaacaaggtcattttccacgtcaacaaggacgtgaagatcacctacaccggcgtcgagctgcgggccgacgatgacgaactggtgtggcagcaggtgttggagtacgcgaagcgcacccctatcggcgagccgatcaccttcacgttctacgagctttgccaggacctgggctggtcgatcaatggccggtattacacgaaggccgaggaatgcctgtcgcgcctacaggcgacggcgatgggcttcacgtccgaccgcgttgggcacctggaatcggtgtcgctgctgcaccgcttccgcgtcctggaccgtggcaagaaaacgtcccgttgccaggtcctgatcgacgaggaaatcgtcgtgctgtttgctggcgaccactacacgaaattcatatgggagaagtaccgcaagctgtcgccgacggcccgacggatgttcgactatttcagctcgcaccgggagccgtacccgctcaagctggaaaccttccgcctcatgtgcggatcggattccacccgcgtgaagaagtggcgcgagcaggtcggcgaagcctgcgaagagttgcgaggcagcggcctggtggaacacgcctgggtcaatgatgacctggtgcattgcaaacgctagggccttgtggggtcagttccggctgggggttcagcagccagcgctttactggcatttcaggaacaagcgggcactgctcgacgcacttgcttcgctcagtatcgctcgggacgcacggcgcgctctacgaactgccgataaacagaggattaaaattgacaattgtgattaaggctcagattcgacggcttggagcggccgacgtgcaggatttccgcgagatccgattgtcggccctgaagaaagctccagagatgttcgggtccgtttacgagcacgaggagaaaaagcccatggaggcgttcgctgaacggttgcgagatgccgtggcattcggcgcctacatcgacggcgagatcattgggctgtcggtcttcaaacaggaggacggccccaaggacgctcacaaggcgcatctgtccggcgttttcgtggagcccgaacagcgaggccgaggggtcgccggtatgctgctgcgggcgttgccggcgggtttattgctcgtgatgatcgtccgacagattccaacgggaatctggtggatgcgcatcttcatcctcggcgcacttaatatttcgctattctggagcttgttgtttatttcggtctaccgcctgccgggcggggtcgcggcgacggtaggcgctgtgcagccgctgatggtcgtgttcatctctgccgctctgctaggtagcccgatacgattgatggcggtcctgggggctatttgcggaactgcgggcgtggcgctgttggtgttgacaccaaacgcagcgctagatcctgtcggcgtcgcagcgggcctggcgggggcggtttccatggcgttcggaaccgtgctgacccgcaagtggcaacctcccgtgcctctgctcacctttaccgcctggcaactggcggccggaggacttctgctcgttccagtagctttagtgtttgatccgccaatcccgatgcctacaggaaccaatgttctcggcctggcgtggctcggcctgatcggagcgggtttaacctacttcctttggttccgggggatctcgcgactcgaacctacagttgtttccttactgggctttctcagcccccgagcgcttagtgggaatttgtaccccttatcgaaccgggagcacaggatgacgcctaacaattcattcaagccgacaccgcttcgcggcgcggcttaattcaggagttaaacatcatgagggaagcggtgatcgccgaagtatcgactcaactatcagaggtagttggcgtcatcgagcgccatctcgaaccgacgttgctggccgtacatttgtacggctccgcagtggatggcggcctgaagccacacagtgatattgatttgctggttacggtgaccgtaaggcttgatgaaacaacgcggcgagctttgatcaacgaccttttggaaacttcggcttcccctggagagagcgagattctccgcgctgtagaagtcaccattgttgtgcacgacgacatcattccgtggcgttatccagctaagcgcgaactgcaatttggagaatggcagcgcaatgacattcttgcaggtatcttcgagccagccacgatcgacattgatctggctatcttgctgacaaaagcaagagaacatagcgttgccttggtaggtccagcggcggaggaactctttgatccggttcctgaacaggatctatttgaggcgctaaatgaaaccttaacgctatggaactcgccgcccgactgggctggcgatgagcgaaatgtagtgcttacgttgtcccgcatttggtacagcgcagtaaccggcaaaatcgcgccgaaggatgtcgctgccgactgggcaatggagcgcctgccggcccagtatcagcccgtcatacttgaagctaggcaggcttatcttggacaagaagatcgcttggcctcgcgcgcagatcagttggaagaatttgttcactacgtgaaaggcgagatcaccaaggtagtcggcaaataatgtctaacaattcgttcaagccgacgccgcttcgcggcgcggcttaactcaagcgttagagagctggggaagactatgcgcgatctgttgaaggtggttctaagcctcgtcttgcgatggcatttcgatccattcccattccgcgctcaagatggcttcccctcggcagttcatcagggctaaatcaatctagccgacttgtccggtgaaatgggctgcactccaacagaaacaatcaaacaaacatacacagcgacttattcacacgagctca

SEQ ID NO: 66 - DNA, 36517 bp, Artificial sequence
  plasmid pDAB108209
aattacaacggtatatatcctgccagtcagcatcatcacaccaaaagttaggcccgaatagtttgaaattagaaagctcgcaattgaggtctacaggccaaattcgctcttagccgtacaatattactcaccggatcctaaccggtttaattaaggcgcgccatgcccgggcaagcggccgcacaagtttgtacaaaaaagcaggcttctagacctaggtggagtcatcacgcagactatctcagcatgtgcgtagcacgcggccgcatcagtaagtgcatataaagaaagtaataagtagatgagtttggtaattacatgagatcgacagaggaattacgacgttcttgccatcaaaaagagattccaaatttgtaaagagccatatgtttgttgggcaattgagattgagtcttgccaatccttctttggaagttgacaatttaaaaattcgaagccagatttactcctaattaattattgagcttgaagtcttaattaccgattacatctctgagcagtagtagtcgatgatctttcccggtcactaattttactcaagcgaatcgatttttactttagtttagctaaccgtacgccattacagtttagagagcagcaagggtaagaacattattaaaacataaagtaaacctctcatttattacggtgtagtgctaattacattagcctcaaacatcctaagcttacagttttataaaacacacacgatgactgtgtatagtattaacatacatcaatagcaacactcatgatcatcgtgctaggccgggcttggactgggtgacctaagtgattaagctaactactcagaacgcaagtgagtctgtcgcaatgacagaggcttgaacatcaatgaagagatcaccttgttcgttgtggaactgaagtgcatgtttgtgctggctatgtccaccactctgattggatctgagggtgatgtagaagggtttgtcttgtgggaccggtctgtgttggactatcctctgaatggagttcgggagtgcagcttgtcccagcgttctcctcacccagaccaacattgcttgaaaggcaagatcattgacaaagggatcatgtgcatcagtgtcagttgcaaactctcctctggctgcatctgatccaggaacagcagaacacttggcaacaagctggctcttggtgcagctgagaacgtcatcaatgcctctgaacgcaggaccatgaaagagagtcttgccatcatagactgacccttgcaaagcaggatctgcatcaaggctcggaggctgcatggttgcattggcaggtggagcaccttggttggacaacactatgacagctctgtaggctggaacaagttttccacttgagaacgtcttgagcgtcgcttggacattcaccctcccactcggagcagtggacggtgtgagggtcacttcacagttgacgtctccatcaacagtgacacctttgaagagctgtgcgtcatctatggcccagagagagtagccagggaagagtccaaggcaggtctcagcaaggctcccaatagcaagggtcattggcaacacccttctgccttgtatgacatgatcctccaagaagggattggacttggcactgatctttctatgcagggtgatcgtgtcacttccaactttcttggatggtgtcctccagtttccaacaaggatctcagcaggacttgatcccaacacaatcctcgcaactgtatcagcacctccttcacgaggaatgatctgaactcccatttcttgaaactgtttcttgagttgaggtgtcaccatcccaccatcccagggaccaaagcagatggacttgacactgacatccttcgcaagttccaaacccatcttgttgagagcttcgtttgccatcgcatagtcagactgaccaacattgccgtggaaaccagcaagggagctgaagagaaccatgtgtttgaggttggcacgatcaactgcagccagaagattctccaacccagtgactttggtcccaaagacagcatcaaactcgtcagggagtttcttctctatgagacgatcacggagcacaccagaagcgtgaacgattccactaactctggcaccaagctgggactctgcatccctaactgctttggcaacatctgcagcagagttcacatcacaagagctgtagatcgctttgccacccagagcttcaatggcagcaatggagcttctcacttcacgagcaccaagaacagatcccacaagtttcgtgacagcccttggagtgggtttgggtccttcaccagcactgaaggccctcttcaactcttgggtggcagctttctgcacagccttctcatcagtgatgccagcacaccatgctggttcagacgcagaaactttgctacgacccaacagaatgtacttgcctccagcaatctgacgcgtgatctcacggatgcaaagaggtgtgatcccacgagcacctccagaaaccagaagcacatcgtctttcgctatctgtctctgagggttcccagtctccaacttggcagctctgattgtgcatctttgctggtttgctccaatcccaacctctctgattctgatgtcagcacacgccatctccctaactatggcaactgcagcatcttctgggtgcatcccttgagcaatgtccacaccacggctgaacacatcagattctgaccactccaaccctattgtcttgcagagtccaaagatcgctccacgctgtgctctcttgagtgcgtcagaagtgccttgagaggtgaatccaagtctgccgtcaagcctagccacaccgatgaaggcaggacgacctccagccacagcagtgcagagagaggctttggcaaacttcgcacacatgagtgtgaaacccagtatctcagctggttcaaacctttctgcttgctggcttatgaagcctcccaacgctccaaatctttgctcagcctctttgatggccttctcagctgattctgctgaaaggtccttagccagaacatgacgaatggcagctgcaccagctctctgagccaactgcaatccctcaaaggtcaagacaactgcacaggctcccaacaccctcacaagagcaagtgtcaactctgagccatcgtcaacgacaagaactggacggttctccggtctttccagaatcagttcatctggccttctgatgtcaaccacctttgcgtgcatcagtgacaaatcgtcacagtcagcaccatgaactgaatcaatcttcacagctggtgcagcaccggcacttgcaggagcggctgcagccggagcaggggctgatccaccagctatctcagccttcatggcatcgaccacttctccaaccgttctggtccttgacaaagcatcgacatctttggcctcaacgttcagcatggcttgaacctcagaaaggatttccacacgcttgatgctatcaatcccaagctctgtttccaactccatgtctgactctatcatgtcagtctcgtatccagtctttgcagccaaaacctccatcacaacagtttcagctttttcaaggagttcgttgctgacagctggtgccgcggcagcgggagcaggagcggctgcagctggcgcaggagcagaacccccagctatctcagccttcatggcatcaaccacctctcccaccgtccttgttctggaaagagcatcaacatctttggcctccacattcaacatcgcttgaacctcagagaggatttcaacacgtttgatggagtcaattccaagctcggtctccagttccatgtcagattcaatcatgtcggtctcatagccagttttcgcagcaaggacttccatcacaactgtctcagccttttccaggagttctgaggagacggccggtgcggctgcagctggagccggtgccgcggctgcgggtgcaggagcggctgcagctggcgcaggcgcggaacttccagcgatctccgccttcatcgcatcaacgacctcaccaactgttctggtccttgagagggcatccacatccttagcctccacattgagcattgcttggacttcactgaggatctcaacacgcttgatgctgtcaatgcccaattccgtctcaagttccatgtcagactcaatcatgtcagtctcatagccggtttttgcagccagcacttccatgacaactgtttcagccttctcaagcaattcgttgctgacagctggtgccgcggctgcgggtgcaggtgcggcagctgccggcgcaggagcagagcctccagcaatctcagccttcatcgcatcgacaacttcccccacagttcttgtcctactgagtgcatcaacatctttagcctcaacgttgagcatggcttgcacctcagagaggatctccactctcttgatggaatctattccaagttcggtctccaattccatgtctgactcaatcatgtccgtttcgtaaccagtttttgcagcaaggacttccatcacaactgtttcggctttctccagcaactcattgctgacggcaggagcggctgcagctggagcaggtgccgcggcagcaggtgcaggtgcggctgcagctggcgcactagcagagcttccggcaatttcagccttcatggcgtccacgacctcaccgactgttctggttcttgaaagcgcatcgacatcttttgcctccacgttcaacatagcttggacctcagacaagatttcaacacgtttgatgctatctattcccaactcggtttcaagctccatgtcactttcaatcatgtcggtctcgtaaccagtcttagctgcgagcacctccatcacaaccgtctcggccttttccaggagttcggatgaaacagctggcgcgggcgcggccggtgctggtgcagctggagctggagctgcggctgccggtgcaggtgccgcggcagctggcgcaggcgcgctccctccagcaatctccgccttcatggcatccacaacctcacccactgtccttgttcttgaaagtgcatcaacatccttagcttcaacattgagcatggcttggacttcactcaggatctccactcttttgatggaatcgatcccaagctctgtctccaattccatatcagattcaatcatgtcggtctcatagccagtctttgcagccaaaacctccatcacaaccgtctcagccttctccaagagttctgaagaaacggcaggtgcaggtgcagctggagcaggtgccgcggctgcgggtgcaggagcggctgcagctggcgcgggcgcagaccctccagcaatttcagccttcatggcatccacaacctcaccaacggtcctcgttctggacagagcatcaacatccttcgcttccacgttcagcatagcttggacctcactgaggatttcaacacgtttgatgctgtctatcccaagttctgtctccaattccatgtcagactcaatcatgtcagtctcatagccggttttagctgccaagacctccatcacgacggtctcagctttttcaaggagttcgtttgagacggccggagcggctgcagctggagctggagccgcggcagcgggaccaggagcggcagcggccggcgcaggagcggagcctccagctatctcagccttcatggcattgacaacctcaccgacagttctggtccttgagagagcatccacatccttagcttccacattgagcatggcttggacttcactgaggatttccacacgcttgatggaatcaattccaagctccgtctcaagctccatgtctgattctatcatgtcagtttcgtagccagttttggcagcaaggacttccatcacaacagtttctgccttttcgagcagctcattagaaacagctggtgcagctgcagctggagccgctttagccggtgcaggtgcggcagctgccggcgccggagcggaagaaccagcgatttctgccttcatagcgttgacaacttcacccactgttctcgtcctagagagagcatcaacatctttcgcctcaacgttaagcatagcttggacttcagaaagaatttcaaccctcttgatgctgtcaattcccaactcagtctcaagctccatgtccgcctcaatcatgtctgtttcgtatccagtcttggcagcgagaacctccatcacaactgtctcagctttctcaagcaactcgttggacacggcgggagcaggagcacttgcaacgggagcggcaggggcagcggctttaacaggcgccggagcagtctgttgctgttgctgttgctgaagggaagaagcatcaacacttccataaccatccagctcagccagcatggacttgaggatggcacgatgtttctccacaacagcagtgtcaactgcaggcttggctgaagctgcagcagtcttggcttcctccttggcagcagcaagtttggagttggcttctgcagctgcacgtttggcgtcgtcaagctgcctctgagcgtcttgaagctccttctgaagcctttcagcctccctcttggcagcttcgtcaaccacaggttcaggagccttgatgagtggtgcagcacccttgaggtatgtgacacatcttccgtcgttcatggcagcatccctcactttcttggtcttgtcactgacataggtggcagctgaaagtctgagtgtggttctctttttcttgatggcttgcatcctcgtggcatcaggagcatcccacttgtcaaacccttgaagattgacaccagccacaaccagctgaactgcagcatccctcaactgtatgtcagagtccgtgccagaagctgggttcacagacactgtgacaacagacgggtcatctttgagggtttcagaaacaagtttgctgagaacttgtttcggtccaaactcaacaaagattctcgcaccagcttggtgcatgttcctcacttgggtcaggaacttcacagatgaggtcatgtgttgagtgagcatctctctggcatccgtcggataggtctctccagaaacattgctgaagagctttgtttctgctttgggtgtacggaaggaaaccttggatatgacatctttgaaagctgagctggcattttccatctgtggagaatggaaggcagactcacaagcaagaggcacaactctgaacccttccttctgcaatctggcactttcagcttgaatcccttcaacagacccagtaatgacagtctgagacggagagtttgagtttccaagccagacgttggcagcttgaaccttgatgttctctgcgttgggtcctatgacagctgccatgcaacctttgggtgtggcaggtgcatctttgcctcccatgatccttgcccttctgcaaacaagttcaaacaactcatctctgtcaacacaaccagctgcatagagcgcagcaaactcacccaagctgtgtccagctgcaaagtctggagtgaatccagcttccttgaaaatctcaaaggcaccaagagcacatgccagggttgacggctggctgtatgctgtgagtgagattttcttgtgatcttgttctggctcacgttcgtacggtttccttgggtacaggacttgagagactctttcaaagtctttgtcacttccagcaaccttggactgtgcagcgtccattgcagcaatggactgtctgaactgaggccagttcatcgcaacttcactgaacatgtgtgtgtactgagcaccttgtccagagaagagtgcagcaacagcaccattggtggcaatgcctttggcacggaaagaaactccttctctcggaagcctccacgcttctttggtcacatctttggcaaactgagcacatatagcacgaagcgtggagcacgcatcctccgcatctttgaccaagaatcccagtctcgcattggtcgcaggtatgctcccagggaacttgaactgttctccaaacttgacacacttgatgtaggcagtattcttgactgtctcattctccttgatcgcagcttcaaactctttcagctgagcttcacaaaggctctgcaacgcagcaggagttgcagccatcatcaacaccggttgtggacgtttgttgagtctgtacgctgtcgtgtgctctggttcagcctcttccaacactgcatggtagttggcacctccaaagccaaagctggatattccagcacgtctcggaacaccaggtggagggaaccagggtctgttcatcgtgttgatgtagagggatgactcattgatgggagtgttgtcatagagattgggtggattgtccacattgatcgttccaggcaaagtcttgtgtttgagagccatgatgaccttgatcattccagcaagaccagcaacagccttcaaatgaccaatactggacttgatacttccaactgcaactttctctgtgttcccttcaccatacgctttgtcaaacaagttcctcaacgcagtcaactcaatcctatctccaactggagtgccagtcccatgaccctcaaccaaagtgacagtggcagggtcaacgcaggcacgattgtatgcacgtctcaaggcttcctcttgaccactgattgtgggagtgtagatgccagctgctttgccatcacttgagcttgcacaaccacgaatcacagcatgaatctcatcaccatccctcactgcatctgcataacgtttgagcaccaacatggctgatccctcaccaatgagcatccctttcgttttctcatcatacgctctcacacttgggtccgtgctgaacacaggtgtctttgagaaagccatgtacatcccaatggagttgtctgtgcaggttgcaccagtgaccatcatgtcgcagtcaccatagagcagttcatcaatcgcaaccttgactgctatcaaggagcttgcacatgcagcatccacaacgcagttcatgccatccaagttgaatgtgttggtgcatctgccagcagtgacattcccaaggaatccagggaaagagtcaagtctccattctgggaagttcgctttgtacttctccacagccactttgacatcttcctctggcatccccatctttctcaagactttctccacaaccacatagttgagtctgctgtagaactcatgtgaactcttctgtccacctccaatgccaagcacgcatcctatgtttttcttctcctttccaagtgcatcaatcccagcatcttgaagtgcttctttgaccttgagaagtgagatggtctgattcgcatcagaatcttccatctggaacatgttgagaccaaactcacgcgcatcaaagtcatactcaggaatgaaacctcctctcttgcagtagattttgtcctttgtggtcttgactgggtcaaagtacgcagtcacatcaacacgatcctcaggaagatcagacaggcaatcaatgccagcccttatggtctcccatgactctctcaccgtggttccacaaggaagtatggcgctcatgcctatgatcgcaatcctcgtgtccatctcacctcctttctgctcttgcagcctcgctgccatttttggttgtggatccgttttgctatttgtgtatgttttcttgttttggtttgagtttaaccatcattctcttctctctatttatagagagaagaggttggcacgcagcactgcgacatgagagaaagacacgggtgaagaggcgggagctgaggtggcagcatgcatgcatgcatggccagtcgtgtcatagtgagaagaggagaaagctgaggtggcaacgtgtatggccagtggtgtcatagtgtgaaagctgacgtggcagcatgcatggtgagtgtgaaaaaggcgccacagtgcagatgttactgaacaaaagcggtgtgccatgcaacttttgcccatcgtcgtctttctcatccaagttcctctttataatatcttttaccaaatcatattttaatataaattcattttatttttaaataaagtaatattatatccataaatattaactctcatttaacacattttcaaatttaacacttctgtaaataaatttattaacaaaaacttgtaaatatgttcaaataaatccataaatattaactttcattttattaacaaaaaaatctttactataagctgcggccgcttaattaagatgagtgatactcaggactcaggactcactctgctgatcactagtgctagcctcgaggtcgacacaactttgtatacaaaagttgtctaggatctgcttttacatgcgagacacatcttctaaagtaattttaataatagttactatattcaagatttcatatatcaaatactcaatattacttctaaaaaattaattagatataattaaaatattacttttttaattttaagtttaattgttgaatttgtgactattgatttattattctactatgtttaaattgttttatagatagtttaaagtaaatataagtaatgtagtagagtgttagagtgttaccctaaaccataaactataagatttatggtggactaattttcatatatttcttattgcttttaccttttcttggtatgtaagtccgtaactggaattactgtgggttgccatgacactctgtggtcttttggttcatgcatggatcttgcgcaagaaaaagacaaagaacaaagaaaaaagacaaaacagagagacaaaacgcaatcacacaaccaactcaaattagtcactggctgatcaagatcgccgcgtccatgtatgtctaaatgccatgcaaagcaacacgtgcttaacatgcactttaaatggctcacccatctcaacccacacacaaacacattgcctttttcttcatcatcaccacaaccacctgtatatattcattctcttccgccacctcaatttcttcacttcaacacacgtcaacctgcatatgcgtgtcatcccatgcccaaatctccatgcatgttccaaccaccttctctcttatataatacctataaatacctctaatatcactcacttctttcatcatccatccatccagagtactactactctactactataataccccaacccaactcatattcaatactactctaggatccacaaccaaaaatgcttcagcacacttggcttccgaagcctcccaatctgaccctcttgtcagatgaggttcatctctggaggattcctcttgaccagcctgagtcacaacttcaagaccttgctgccaccctgagcagtgatgaattggcgagggcaaacagattctactttccagaacacagaaggcgtttcactgctgggagaggcatcctcagatccatcttgggtggatacttgggagtggaaccgggtcaagtcaagtttgattatgagtcccgtgggaaaccgatccttggtgacagatttgctgagagtggactcctgttcaacttgtctcacagccagaaccttgccttgtgtgctgtcaactacacgcgtcaaataggcattgatcttgaatatctgcgtccaacatctgacttggagtctcttgcaaagaggttctttctcccaagagaatatgaactcttgaggtcactccctgatgagcagaaacagaagattttctttcgttactggacttgcaaagaggcttatctcaaagcaacgggagatggaatagccaaacttgaagagatcgagatagcactcaccccaacagaacctgccaagctccaaacagctcctgcgtggtctctgttggagcttgtgccagatgacaattgtgttgcagctgtggctgttgcgggttttggttggcagcccaagttctggcattactgagtagttagcttaatcacttaggtcacctcgagtatcaaaatctatttagaaatacacaatattttgttgcaggcttgctggagaatcgatctgctatcataaaaattacaaaaaaattttatttgcctcaattattttaggattggtattaaggacgcttaaattatttgtcgggtcactacgcatcattgtgattgagaagatcagcgatacgaaatattcgtagtactatcgataatttatttgaaaattcataagaaaagcaaacgttacatgaattgatgaaacaatacaaagacagataaagccacgcacatttaggatattggccgagattactgaatattgagtaagatcacggaatttctgacaggagcatgtcttcaattcagcccaaatggcagttgaaatactcaaaccgccccatatgcaggagcggatcattcattgtttgtttggttgcctttgccaacatgggagtccaaggttggcgcgccgaattcgcggccgcttaattaactactgtcactgaggccgtagacgagtacggactgatctaactagaaccggtgactactctacagccttggattaggcacggcatcgcgatctcttgggccgttgacttttaacttgcgatgacttttctaatttacgagtcaataaccattctccctcagatattgacttgttcgtagataagtgtcactttggaagctagcattacgagtacacgggtcggcaacttgcaaatcgtcgaaaattgctatgcaagttgatctctgatttggtagtacactcagctttgtgatcagccaatactcattacgtggtttattagcaaaatgaatcgacatgagccacagcgagtgacaccagttacgattccctcacaacctccgtctcgtgaaacgtaatagatcagcgttgtatgatgtaagatattgtagttttggatgtcaacgtagggtcgtgaagaggtttattaactcacatgttggaacccttagtgagttttcactttacaaatcacgcgtgccactacgtattacttcatcgtagatagggacaacacagaaacgaaagtgcgaaacctttacatcaccaggtcccaggcgagattcccaggggtgactaaaagtacgcatttgaaaactatgggggctattgaatctaaacatcagatagtcaccatgatcaatatccccgttacgcttgcttcgtaatctgggggagtagccgcttcccgcgcttacgagcgtgctcaagggccatacaaactgaccccagtgagccgttcagagtgcgtgccattgagaattggcgtacttctgttgaaaaaagtgcgataacgctcttcagggtggtcgataacccaagcgtagaatcacactttgcagaggatatgaggttcttaactaggatacttggggcgatcatcaagtaaggatgaagtcgcgtacgtactttctacatgctcagctaaagtgcaagcgggggacatgacgagatgattccaggaatcggggacattggcttagggcttatagatgtcttgttcgataacaccggtggatccccgggtaccgagctcgaattcctcgaccaacttttctatacaaagttgtctagacctaggactaggcactgagtgactcactgacctgactgagtgactggcggccgcatcagtaagtgcatataaagaaagtaataagtagatgagtttggtaattacatgagatcgacagaggaattacgacgttcttgccatcaaaaagagattccaaatttgtaaagagccatatgtttgttgggcaattgagattgagtcttgccaatccttctttggaagttgacaatttaaaaattcgaagccagatttactcctaattaattattgagcttgaagtcttaattaccgattacatctctgagcagtagtagtcgatgatctttcccggtcactaattttactcaagcgaatcgatttttactttagtttagctaaccgtacgccattacagtttagagagcagcaagggtaagaacattattaaaacataaagtaaacctctcatttattacggtgtagtgctaattacattagcctcaaacatcctaagcttacagttttataaaacacacacgatgactgtgtatagtattaacatacatcaatagcaacactcatgatcatcgtgctaggccgggcttggactgggtgacctaagtgattaagctaactactcaaagcgcattcgttggctcatagacaaaggcagcatcttcagtctcaagatcaatcctcggatcatttctcagagcattaagacgcctcaggtaacatgcaccacgcaaaatctgaaggttgatctggacaacacatgggtactcattagagacagcaggatcaagatatgttcctttgatgaagtcattgaaggctccaatggctggaccacaccagacttgatagtccatgacacgatcaggagcacccatgttggcccaacgtgatgcaagaccaagataccatctgaaacacaaagacatcttgagtttggggtcatgttccgctctctgtatcttctctggattcttcaaaccattgatgtaaaagtccttggtctcttcccagacctcttgaagtgccctcttgaagatcctcttctcgatcctttcaagttcagcaggaggcattgaatcgaaagagtcgtacttgcaaaagagttcgtacaatttgttagctcttgatgggaacattgttcccttcttgagaacttggagtttcacaccttcctcaaacatatcagctgctggagccatgcaaatgtcactgtaggtggcttgactgagttgttttctcacgttgtcacatgtcccggactgtttagcaacttgattgacagtcccagtcactatgaaggcagctcccattgtgagggcagccgcagcagcttgtgggcagccaacaccgcctccagctccaactctgactctaaggtgcgcaggataaccacactctctgtgcagtctgttcctaaggttgatgatcaaaggcaagatgacgtggatgggacggttgtcagtgtgaccaccagaatcagcttcaacagcgatgtcgtctgcgacaggaacacgacgggcaagttcggcttgttcttgtgttatctcaccagaagctatgagtttctcaaggaggtgttccggagccggtctgatgaacatttcggcgagttctgttctggacacttttccaatgatacggtttctgatgttgacactcccatcagcgttccttgagagtccggctgcacggtaacgaacaacttggggagtgagggtcatgaatgcagaagcctccaccacagtaacgcccttttcgaggaagagatcaacattccccttttccaagttgctgtcaaaaggtgaatgaatgaggttcacagcatatggtccttgaggcagagccgcttgtatcttctccaaagctgccctcacatggtgcattggaagcccacccgctccaaaagaacccaatatcttcctcttcccagcagcaatgacaaggtccgcagacgcaattcccttggccattgctccagtgtacagaggtgctgacacattgtacgtttccatgaaggacttgtcaccaagatcacttatggagcatggtttgatactgacaatccttgaagaagttgcaggtttggattcaaactgcaccaaattggagttttcaacaccaagatacaatggattgtccacttcaagcaggacatctctcaactgagtcggactgagtgcaactccagttttcccagggtccgcttttgcgctgggtggctgttgttgaacatccggaatggcttgaggttttgcactgacaacacgaactctgagttctttggcttcatacacacggagaccatcaacccaaagtgctccatctgccactatgtcaacgtagcctccattttcaggagaggctgtgattgaaactatgtgcacctcacagtccatcgcacggttctttggtgtcaattgaccacggtacttccacgccgtttttccaggggcatgggcaaaggtcggattgctcacattgtattctcccggtatgttctggtccaccgcaaatgcctcaatgagctggaacattgactcaattcccaaagatccaggcatcacaggatcaaaccaaaagtgacaagagaagaaccagtcttgtgggttaacatctttgtgtccatgcgcatatcctttcccatgcagcccagaatcaggagcaatgttgaggtaatccaaatactcacactgttctgaccttctgagaacttgagcattagttgcatctggaagtttctcagtcagctgttctttgcctttggctgatgcgatttcaactcttctcacactcgtgttgttagttttgcaccaaggctccgtctttttcccattgtcaagtccagcttgctgagcaaacacctctggagtgaaccatccaaaggaagtgcttcctttgtagaaaaccacgccatcaacagacaactcaaacgtgaatctgtgaatccccatctttcccaacattgcatatccagtgcacttggtcacattccttatggttttccccctcacatccacatctggcctcaccatttcagcacttgcatcaaggttcctaaagagaatgtcatctttgtccatcgtcagtggtgctttcaacacactggtgagaacaccggatgtctgaagtccgatttccatgatgatggaataaggcatgtgcccatcattgcaagaaccatcaaagaaccacgcatcttgaggacagtcaaactcccccaccattgtgcctttgctgggattgcaatcaacattcaggaacttgccatgttccatgtttgtgacttcaacaactctagtcacaagagccaaatcaaaagcagggcttctgctcgtatttgacttatcaaatcttgcgaactctggtcccaagcagttgctaacttttccacacatgaactctgacatgttgtaccagttcagaggcatttctccagctttgcaattgttgtcaagtgggttgccagggaaagggatgaagcaaattgccctcggagggtaagaactaggggagaagaacggcgtcgggttgccaggaagttttgacatgggatgccaggacatttctttcggagcgagagcgtcacccttgaggatatgttcaggaagtgcaactggctttggcgcaagaacatctgctgagaaagcaggcttcgcaggggcagcagaagcactagcactggcaccagagctggccttggacgcttccggtcccacagtggctgcaccgttagcaaaaacgggctgaactttggaggggttcttgttcgtggatctcttctgcatcttgagagcaatgcccttgaagtccacgacgatctttttgttaagatccccctttccgtagtcgctgattctatcaaggctgaaatcttgacccttttcgaaatcaacgtcaatgatgttgacgtcagcaatggcgtacggatcgttatcctcgtcgaatcccatctctttgatctccatgacgtagaccaactttcccttatgaggagatatctgacccctacacctaactttgttcgggtgtccgttgacgggtctgaagtcaaatggtccggtggtaaggtgcaaaccgagccagatcatgtacatcttgagcatttgtgaacaaccgtcgctgacaagagatccagccatgacttgatccttaacaaaatggcatgggaagtaccaatggtccctctccaagattttctcaccaaccaactgacccaaaccgtacacacctcccttatggtcaatgctggtgactctatcaatcatgagcatcttacgtgcgcagagtttgtagttgatctccggcatgccattctttgagccaaaaacggaagcccaatctttgtcaaccaaggtctgcatctccttttcgttgagttttgttttgtgaaggcagggagcgacagcatagggagaaacatcttgctttggaatcttagctctggcagccaaatcccctcttgtgaacaccacaccctttcccgcatcaagctcctcatttgtgaagaagccagcacagccatctctcatctcaatgagaagcctcccattgacatagcagtcatactcaaagaagaacatggagatgccaccatccaaacgtttggcaaaaccggtcactctgatgtcatactcaagggtctctccctcatgggcaaccccatagaatgtcaacgtggtgttgagcagacggtaaactctgtcaccttggttctggaaatcaattcccatgtatgatatcagcatcaaatcgcactgtccactctcaaccagaactgcccagggacaatcacctccctcagacaattcgccattcactggaagatcatactcagtgaccattctggcaccaactctgtagttgttgacctcggcatccatgagtgtgacccttgtcacaagcaggtattcacgagcaggcagcctcacccttctggggtacttgtctatgacagcaaactccggaccaaaaaccttagctatgtcaccctctgcaaactccaggagttcctcatagttgaacacctcagttttgccagaggtcagttcctccttggtcatctcccaacatggcttcttgttggtcttgacacgaagcgccatttttggttgtggatccgttttgctatttgtgtatgttttcttgttttggtttgagtttaaccatcattctcttctctctatttatagagagaagaggttggcacgcagcactgcgacatgagagaaagacacgggtgaagaggcgggagctgaggtggcagcatgcatgcatgcatggccagtcgtgtcatagtgagaagaggagaaagctgaggtggcaacgtgtatggccagtggtgtcatagtgtgaaagctgacgtggcagcatgcatggtgagtgtgaaaaaggcgccacagtgcagatgttactgaacaaaagcggtgtgccatgcaacttttgcccatcgtcgtctttctcatccaagttcctctttataatatcttttaccaaatcatattttaatataaattcattttatttttaaataaagtaatattatatccataaatattaactctcatttaacacattttcaaatttaacacttctgtaaataaatttattaacaaaaacttgtaaatatgttcaaataaatccataaatattaactttcattttattaacaaaaaaatctttactataagctgcggccgcttaattaatcacgagtggatgactgtcacgactgactcatgactgactactagtgctagcctcgaggtcgacacaactttgtataataaagttgtctagtctgcttttacatgcgagacacatcttctaaagtaattttaataatagttactatattcaagatttcatatatcaaatactcaatattacttctaaaaaattaattagatataattaaaatattacttttttaattttaagtttaattgttgaatttgtgactattgatttattattctactatgtttaaattgttttatagatagtttaaagtaaatataagtaatgtagtagagtgttagagtgttaccctaaaccataaactataagatttatggtggactaattttcatatatttcttattgcttttaccttttcttggtatgtaagtccgtaactggaattactgtgggttgccatgacactctgtggtcttttggttcatgcatggatcttgcgcaagaaaaagacaaagaacaaagaaaaaagacaaaacagagagacaaaacgcaatcacacaaccaactcaaattagtcactggctgatcaagatcgccgcgtccatgtatgtctaaatgccatgcaaagcaacacgtgcttaacatgcactttaaatggctcacccatctcaacccacacacaaacacattgcctttttcttcatcatcaccacaaccacctgtatatattcattctcttccgccacctcaatttcttcacttcaacacacgtcaacctgcatatgcgtgtcatcccatgcccaaatctccatgcatgttccaaccaccttctctcttatataatacctataaatacctctaatatcactcacttctttcatcatccatccatccagagtactactactctactactataataccccaacccaactcatattcaatactactctaggatccacaaccaaaaatggctgcaaggaacgtgagtgcggctcatgagatgcatgacgagaagaggatagctgttgtgggcatggctgttcagtatgctggatgcaaaacgaaagacgagttctgggaagttctcatgaatggaaaagttgagagcaaagtgatcagcgacaaacgtcttggttcaaattaccgtgctgaacactacaaagctgaaaggagcaagtatgctgacaccttctgcaatgagacatatggaactcttgatgagaacgaaatagacaatgagcatgaactccttttgaaccttgccaaacaagccttggctgaaacatctgtcaaagattcaacaagatgtggcatagtttctggatgcctcagcttcccgatggacaacctccaaggtgaactcttgaatgtgtaccagaaccatgttgagaagaaacttggtgccagagttttcaaagatgcctctcactggtcagaaagagaacagtccaacaaaccagaggctggtgacagaagaatcttcatggaccctgcttcctttgttgctgaggaactcaatcttggcgctctccactactctgttgatgctgcctgtgccactgcgctctatgtgctcagactggcgcaagatcacttggtctctggtgcagctgatgtgatgctttgtggtgcaacatgcctgccggagccgtttttcatactctctgggttctcaaccttccaagccatgcctgttggaacgggtcagaatgtgtccatgccgctgcacaaagattctcaaggattgacccctggtgaaggaggttccatcatggtcctcaaacgtttggatgacgcaatcagagatggagatcacatctatggaacacttttgggagccaatgtcagcaacagtggcactggtctgccacttaaaccccttttgccgtcagagaaaaagtgcctcatggacacctacacacgtatcaatgtgcatccccacaagattcagtatgttgaatgccatgcaactgggactccacaaggtgatcgtgtggaaattgatgctgtgaaggcttgctttgaaggcaaagtcccacgttttggaaccacaaaagggaactttggacacacattggtggcagctgggtttgctggcatgtgcaaagtgcttctctccatgaagcacgggatcattccacccactccgggaatagatgacgaaacgaagatggaccctctggttgtctctggtgaggccattccctggccagaaacgaatggagaaccgaagcgtgctggtctctcagcgtttggatttggtgggaccaatgctcatgctgtctttgaggaacatgacccaagcaatgctgcatgcactggccatgactccatttctgctctctctgcacgttgtggtggtgagtcaaacatgagaatagcaatcactgggatggatgccacttttggtgctttgaaaggattggatgcttttgaaagggccatctacactggtgctcatggtgctataccactcccagaaaagagatggagattcctggggaaagacaaggacttccttgatctttgtggagtcaaagcaacaccgcatggctgttacattgaagatgttgaagttgatttccagaggctgaggactccaatgactcctgaagatatgctcttgcctcaacagcttctggctgtcaccacaattgatagggccatattggactctggcatgaagaaaggtggaaatgtggctgtctttgtggggttggggaccgatcttgaactctaccgtcaccgtgcaagggttgctctcaaggagagagtgaggcctgaagccagcaagaaactcaatgacatgatgcagtacatcaatgattgtgggacaagcacttcttacaccagctacataggcaacttggttgcaacaagggtcagttcacaatggggcttcacgggaccttccttcacaatcacagaaggcaacaattctgtgtacagatgtgctgaacttggcaaatacctcttggaaacgggagaggttgatggggttgtggttgcgggtgttgatctctgtgggagtgctgagaacctttacgtcaagtcaaggcgtttcaaggtgtctacatctgacaccccgagagccagctttgatgcagctgctgatggttactttgttggagagggctgtggtgcatttgtgctcaagcgtgagacaagctgcaccaaggatgacagaatctatgcttgcatggatgccatagttcctggaaatgttccatctgcatgtttgagagaggcattggatcaagccagagtcaagcctggagacatcgagatgttggagctttctgctgattcagcgaggcatttgaaggacccgtctgttctcccaaaggaactcactgctgaggaagagattggcggacttcagacgattcttcgtgacgatgacaagctcccaaggaatgttgcaactggaagtgtcaaggccactgttggtgacactggttatgcttctggtgctgccagtttgattaaggctgcgctttgcatctacaaccgttacctgcccagcaatggagatgactgggatgaacctgcacctgaagcaccctgggacagcacactctttgcgtgccagacctcaagagcttggttgaagaaccctggtgagagacgttatgcggctgtttccggagtcagtgaaaccagaagttgctacagtgtgctgctttctgaagcagagggacactacgagagagagaacagaatcagtttggatgaggaagcacccaagctcattgtgttgagagcagactcccatgaagagattcttggaagattggacaagataagggaaaggttcttgcagcccacgggtgctgcacccagagagtctgaattgaaggcgcaagcccgtaggatctttcttgaactccttggtgagacccttgcccaagatgcagcttcatctggaagtcagaagccccttgctctcagcttggtctccactccatccaagctccagagagaggtggaacttgcggcaaaaggcattccgagatgtctcaagatgagacgtgattggagttcccctgctggaagcagatatgcgcctgagcctttggccagtgacagagttgccttcatgtatggagaaggaaggagcccttactatggcatcacacaagacattcataggatttggcctgaacttcatgaggtcatcaatgagaaaacaaaccgtctctgggctgaaggtgacagatgggtcatgccaagggccagcttcaagagtgagcttgagtcacaacagcaagagtttgacagaaacatgattgaaatgttccgtcttggaatcctcacctcaattgccttcacaaacctggcgagagatgttctcaacatcacgcccaaagcagcctttggactcagtttgggagagatttccatgatctttgctttctccaagaaaaacggtttgataagcgatcagttgacaaaggatttgagagagtcagatgtctggaacaaagctctggctgttgagttcaatgcgctcagagaagcctggggcattccacagtctgtcccaaaagatgagttctggcaaggttacatagtgaggggaacgaaacaagacatagaagcagccatagcaccagactcaaagtatgtgaggttgaccatcatcaatgatgccaacactgctctcatcagtggaaagcctgatgcatgcaaagctgcgattgctcgtcttggtggcaacatccctgcgcttccagtcactcaaggcatgtgtgggcattgcccagaggtgggaccttacaccaaggacatcgcaaagatccacgccaaccttgagttccctgtggttgatggtcttgatctctggactaccataaaccagaagaggcttgtgccaagagccacgggtgccaaagatgaatgggctccttcatcctttggggagtatgctggacagctctatgagaaacaagccaacttccctcagatagttgaaaccatctacaagcagaactatgatgtgtttgttgaagttgggccaaacaatcacagaagcacagcagtgagaaccacgcttggaccacagagaaaccaccttgctggtgccatagacaagcagaacgaggatgcttggacgacaatagtcaagctcgtggcttcattgaaggctcaccttgttcctggagtgaccatcagtccgctctaccactccaagctcgttgcagaggctgaggcttgttatgctgcgctctgtaaaggtgagaaacccaagaaaaacaagtttgtgagaaagattcagttgaatggcagattcaacagcaaggcagaccccatctcctcagcagaccttgcatccttcccacctgcggaccctgcgattgaagctgccatctcttcaaggatcatgaagcctgtggctccgaaattctatgcgcgtctcaacattgatgagcaagatgagaccagagatccgatcttgaacaaggacaatgcgccttccagctccagctcttccagcagttcctcttccagcagttcatctccgtctcctgctccttcagctccagttcagaagaaagctgccccagctgcggagacaaaagctgttgccagtgctgatgcacttcgtagtgccctgcttgatcttgactccatgcttgcgctcagctctgcaagtgcttctggcaaccttgttgagactgcgccatctgatgccagtgtcattgtccctccgtgcaacattgctgatcttggcagcagagctttcatgaaaacttatggtgtttctgcgcctctgtacaccggtgcaatggccaagggaattgcctctgcggacttggtgatcgcagctggaaggcaaggaatccttgcgtcatttggtgctggaggccttccaatgcaagttgtgcgtgagtccattgaaaagattcaagctgccctgcccaatggaccatatgctgtcaacctcatccattctccttttgacagcaaccttgagaagggaaatgttgatctcttcttggaaaagggtgtcacttttgttgaggcttcagccttcatgacgttgacaccgcaagttgtcagatacagagcggctgggttgacgaggaatgcagatgggtcagtcaacataaggaacagaatcattgggaaagtctccagaactgagctggctgaaatgttcatgcgtcctgcacctgagcatcttttgcagaagctcattgcttctggggagatcaatcaagaacaagctgagttggccagacgtgttcctgtggctgatgacattgcggttgaagctgattctggtggacacactgacaaccgtccaatccatgtcattctgcctctgattatcaacctgagggataggcttcacagagagtgtggatacccagcaaacctgagggttcgtgttggtgctgggggtggcattgggtgtccccaagctgcgctggcaactttcaacatgggtgcctctttcattgtcactggaacagtgaaccaagttgccaaacaatctgggacgtgtgacaatgtgaggaaacagcttgcgaaagcaacttactcagatgtttgcatggcaccggcagctgacatgtttgaggaaggtgtgaaacttcaagttttgaagaaaggaacaatgttcccttcaagagccaacaaactctatgagttgttctgcaagtatgattcttttgagtccatgcctccagcagagcttgcgagggttgagaaaagaatcttcagtcgtgcattggaagaggtctgggatgagaccaagaacttctacatcaaccgtctccacaacccagagaagatacagagggctgagagggaccccaaactgaagatgtcactgtgtttcagatggtatctgtccctggcttcaaggtgggccaacactggagcttctgacagagtcatggactaccaagtttggtgtggtcctgccattggttcattcaatgatttcatcaaaggaacttaccttgatccggcagtggcaaatgagtacccgtgtgttgtgcagatcaacaaacagattcttagaggagcgtgcttcttgaggcgtcttgaaatactgagaaatgcaaggctttcagatggtgcagctgcacttgtggcgagcattgatgacacatatgtccctgctgagaagctgtgagtagttagcttaatcacttaggtcacctcgagtatcaaaatctatttagaaatacacaatattttgttgcaggcttgctggagaatcgatctgctatcataaaaattacaaaaaaattttatttgcctcaattattttaggattggtattaaggacgcttaaattatttgtcgggtcactacgcatcattgtgattgagaagatcagcgatacgaaatattcgtagtactatcgataatttatttgaaaattcataagaaaagcaaacgttacatgaattgatgaaacaatacaaagacagataaagccacgcacatttaggatattggccgagattactgaatattgagtaagatcacggaatttctgacaggagcatgtcttcaattcagcccaaatggcagttgaaatactcaaaccgccccatatgcaggagcggatcattcattgtttgtttggttgcctttgccaacatgggagtccaaggttggcgcgccgaattcgcggccgcttaattaatctgacctgaccactagacctgagtgagtacagatgtgctactagtgctagcctcgaggtcgacacccagctttcttgtacaaagtggttgcggccgcttaattaaatttaaattcaattaatgcaatcttgattttcaacaacgaaggtaatggcgtaaaagaaaaaatgtatgttattgtattgatctttcatgatgttgaagcgtgccataatatgatgatgtataattaaaatattaactgtcgcattttattgaaatggcactgttatttcaaccatatctttgattctgttacatgacacgactgcaagaagtaaataatagacgccgttgttaaagaattgctatcatatgtgcctaactagagggaatttgagcgtcagacctaatcaaatattacaaaatatctcactctgtcgccagcaatggtgtaatcagcgcagacaaatggcgtaaagatcgcggaaaaacctccccgagtggcatgatagctgcctctgtattgctgatttagtcagccttatttgacttaagggtgccctcgttagtgacaaattgctttcaaggagacagccatgccccacactttgttgaaaaacaaattgcctttggggagacggtaaagccagttgctcttcaataaggaatgtcgaggaggcaatgtaaccgcctctggtagtacacttctctaatccaaaaatcaatttgtattcaagataccgcaaaaaacttatggtttaaaccctgcaggactagtccagaaggtaattatccaagatgtagcatcaagaatccaatgtttacgggaaaaactatggaagtattatgtaagctcagcaagaagcagatcaatatgcggcacatatgcaacctatgttcaaaaatgaagaatgtacagatacaagatcctatactgccagaatacgaagaagaatacgtagaaattgaaaaagaagaaccaggcgaagaaaagaatcttgaagacgtaagcactgacgacaacaatgaaaagaagaagataaggtcggtgattgtgaaagagacatagaggacacatgtaaggtggaaaatgtaagggcggaaagtaaccttatcacaaaggaatcttatcccccactacttatccttttatatttttccgtgtcatttttgcccttgagttttcctatataaggaaccaagttcggcatttgtgaaaacaagaaaaaatttggtgtaagctattttctttgaagtactgaggatacaacttcagagaaatttgtaagtttgtaggtaccagatctggatcccaaaccatgtctccggagaggagaccagttgagattaggccagctacagcagctgatatggccgcggtttgtgatatcgttaaccattacattgagacgtctacagtgaactttaggacagagccacaaacaccacaagagtggattgatgatctagagaggttgcaagatagatacccttggttggttgctgaggttgagggtgttgtggctggtattgcttacgctgggccctggaaggctaggaacgcttacgattggacagttgagagtactgtttacgtgtcacataggcatcaaaggttgggcctaggatctacattgtacacacatttgcttaagtctatggaggcgcaaggttttaagtctgtggttgctgttataggccttccaaacgatccatctgttaggttgcatgaggctttgggatacacagcccggggtacattgcgcgcagctggatacaagcatggtggatggcatgatgttggtttttggcaaagggattttgagttgccagctcctccaaggccagttaggccagttacccaaatctgagtagttagcttaatcacctagagctcgatcggcggcaatagcttcttagcgccatcccgggttgatcctatctgtgttgaaatagttgcggtgggcaaggctctctttcagaaagacaggcggccaaaggaacccaaggtgaggtgggctatggctctcagttccttgtggaagcgcttggtctaaggtgcagaggtgttagcgggatgaagcaaaagtgtccgattgtaacaagatatgttgatcctacgtaaggatattaaagtatgtattcatcactaatataatcagtgtattccaatatgtactacgatttccaatgtctttattgtcgccgtatgtaatcggcgtcacaaaataatccccggtgactttcttttaatccaggatgaaataatatgttattataatttttgcgatttggtccgttataggaattgaagtgtgcttgaggtcggtcgccaccactcccatttcataattttacatgtatttgaaaaataaaaatttatggtattcaatttaaacacgtatacttgtaaagaatgatatcttgaaagaaatatagtttaaatatttattgataaaataacaagtcaggtattatagtccaagcaaaaacataaatttattgatgcaagtttaaattcagaaatatttcaataactgattatatcagctggtacattgccgtagatgaaagactgagtgcgatattatggtgtaatacataggaattcgtttaaacgatctgcgtctaattttcggtccaacttgcacaggaaagacgtcgaccgcggtagctcttgcccagcagactgggcttccagtcctttcgctcgatcgggtccaatgttgtcctcagctgtgaaccggaagcggacgaccaacagtggaagaactgaaaggaacgagccgtctataccttgatgatcggcctctggtgaagggtatcatcgcagccaagcaagctcatgaaaggctgatgggggaggtgtataattatgaggcccacggcgggcttattctttagggaggatctatctcgttgctcaagtgcatggcgcaaagcagttattggagtgcggattttcgttggcatattattcgccacgagttagcagacgaagagaccttcatgaacgtggccaaggccagagttaagcagatgttacgccctgctgcaggcctttctattatccaatagttggttgatctttggaaagagcctcggctgaggcccatactgaaagagatcgatggatatcgatatgccatgttgtttgctagccagaaccagatcacatccgatatgctattgcagcttgacgcagatatggaggataagttgattcatgggatcgctcaggagtagctcatccatgcacgccgacaagaacagaaattccgtcgagttaacgcagccgcttacgacggattcgaaggtcatccattcggaatgtattagtttgcaccagctccgcgtcacacctgtcttcatttgaataagatgttagcaattgtttttagctttgtcttgttgtggcagggcggcaagtgcttcagacatcattctgttttcaaattttatgctggagaacagcttcttaattcctttggaaataatagactgcgtcttaaaattcagatgtctggatatagatatgattgtaaaataacctatttaagtgtcatttagaacataagttttatgaatgttcttccattttcgtcatcgaacgaataagagtaaatacaccttttttaacattacaaataagttcttatacgttgtttatacaccgggaatcatttccattattttcgcgcaaaagtcacggatattcgtgaaagcgacataaactgcgaaatttgcggggagtgtcttgagtttgcctcgaggctagcgcatgcacatagacacacacatcatctcattgatgcttggtaataattgtcattagattgtttttatgcatagatgcactcgaaatcagccaattttagacaagtatcaaacggatgtgacttcagtacattaaaaacgtccgcaatgtgttattaagttgtctaagcgtcaatttgatttacaattgaatatatcctgccccagccagccaacagctcgatttacaattgaatatatcctgccggccggcccacgcgtgtcgaggaattctgatctggcccccatttggacgtgaatgtagacacgtcgaaataaagatttccgaattagaataatttgtttattgctttcgcctataaatacgacggatcgtaatttgtcgttttatcaaaatgtactttcattttataataacgctgcggacatctacatttttgaattgaaaaaaaattggtaattactctttctttttctccatattgaccatcatactcattgctgatccatgtagatttcccggacatgaagccatttacaattgaatatatcctgccgccgctgccgctttgcacccggtggagcttgcatgttggtttctacgcagaactgagccggttaggcagataatttccattgagaactgagccatgtgcaccttccccccaacacggtgagcgacggggcaacggagtgatccacatgggacttttaaacatcatccgtcggatggcgttgcgagagaagcagtcgatccgtgagatcagccgacgcaccgggcaggcgcgcaacacgatcgcaaagtatttgaacgcaggtacaatcgagccgacgttcacgcggaacgaccaagcaagcttggctgccatttttggggtgaggccgttcgcggccgaggggcgcagcccctggggggatgggaggcccgcgttagcgggccgggagggttcgagaagggggggcaccccccttcggcgtgcgcggtcacgcgcacagggcgcagccctggttaaaaacaaggtttataaatattggtttaaaagcaggttaaaagacaggttagcggtggccgaaaaacgggcggaaacccttgcaaatgctggattttctgcctgtggacagcccctcaaatgtcaataggtgcgcccctcatctgtcagcactctgcccctcaagtgtcaaggatcgcgcccctcatctgtcagtagtcgcgcccctcaagtgtcaataccgcagggcacttatccccaggcttgtccacatcatctgtgggaaactcgcgtaaaatcaggcgttttcgccgatttgcgaggctggccagctccacgtcgccggccgaaatcgagcctgcccctcatctgtcaacgccgcgccgggtgagtcggcccctcaagtgtcaacgtccgcccctcatctgtcagtgagggccaagttttccgcgaggtatccacaacgccggcggccgcggtgtctcgcacacggcttcgacggcgtttctggcgcgtttgcagggccatagacggccgccagcccagcggcgagggcaaccagcccggtgagcgtcggaaagggtcgacggatcttttccgctgcataaccctgcttcggggtcattatagcgattttttcggtatatccatcctttttcgcacgatatacaggattttgccaaagggttcgtgtagactttccttggtgtatccaacggcgtcagccgggcaggataggtgaagtaggcccacccgcgagcgggtgttccttcttcactgtcccttattcgcacctggcggtgctcaacgggaatcctgctctgcgaggctggccggctaccgccggcgtaacagatgagggcaagcggatggctgatgaaaccaagccaaccaggaagggcagcccacctatcaaggtgtactgccttccagacgaacgaagagcgattgaggaaaaggcggcggcggccggcatgagcctgtcggcctacctgctggccgtcggccagggctacaaaatcacgggcgtcgtggactatgagcacgtccgcgagctggcccgcatcaatggcgacctgggccgcctgggcggcctgctgaaactctggctcaccgacgacccgcgcacggcgcggttcggtgatgccacgatcctcgccctgctggcgaagatcgaagagaagcaggacgagcttggcaaggtcatgatgggcgtggtccgcccgagggcagagccatgacttttttagccgctaaaacggccggggggtgcgcgtgattgccaagcacgtccccatgcgctccatcaagaagagcgacttcgcggagctggtattcgtgcagggcaagattcggaataccaagtacgagaaggacggccagacggtctacgggaccgacttcattgccgataaggtggattatctggacaccaaggcaccaggcgggtcaaatcaggaataagggcacattgccccggcgtgagtcggggcaatcccgcaaggagggtgaatgaatcggacgtttgaccggaaggcatacaggcaagaactgatcgacgcggggttttccgccgaggatgccgaaaccatcgcaagccgcaccgtcatgcgtgcgccccgcgaaaccttccagtccgtcggctcgatggtccagcaagctacggccaagatcgagcgcgacagcgtgcaactggctccccctgccctgcccgcgccatcggccgccgtggagcgttcgcgtcgtctcgaacaggaggcggcaggtttggcgaagtcgatgaccatcgacacgcgaggaactatgacgaccaagaagcgaaaaaccgccggcgaggacctggcaaaacaggtcagcgaggccaagcaggccgcgttgctgaaacacacgaagcagcagatcaaggaaatgcagctttccttgttcgatattgcgccgtggccggacacgatgcgagcgatgccaaacgacacggcccgctctgccctgttcaccacgcgcaacaagaaaatcccgcgcgaggcgctgcaaaacaaggtcattttccacgtcaacaaggacgtgaagatcacctacaccggcgtcgagctgcgggccgacgatgacgaactggtgtggcagcaggtgttggagtacgcgaagcgcacccctatcggcgagccgatcaccttcacgttctacgagctttgccaggacctgggctggtcgatcaatggccggtattacacgaaggccgaggaatgcctgtcgcgcctacaggcgacggcgatgggcttcacgtccgaccgcgttgggcacctggaatcggtgtcgctgctgcaccgcttccgcgtcctggaccgtggcaagaaaacgtcccgttgccaggtcctgatcgacgaggaaatcgtcgtgctgtttgctggcgaccactacacgaaattcatatgggagaagtaccgcaagctgtcgccgacggcccgacggatgttcgactatttcagctcgcaccgggagccgtacccgctcaagctggaaaccttccgcctcatgtgcggatcggattccacccgcgtgaagaagtggcgcgagcaggtcggcgaagcctgcgaagagttgcgaggcagcggcctggtggaacacgcctgggtcaatgatgacctggtgcattgcaaacgctagggccttgtggggtcagttccggctgggggttcagcagccagcgctttactggcatttcaggaacaagcgggcactgctcgacgcacttgcttcgctcagtatcgctcgggacgcacggcgcgctctacgaactgccgataaacagaggattaaaattgacaattgtgattaaggctcagattcgacggcttggagcggccgacgtgcaggatttccgcgagatccgattgtcggccctgaagaaagctccagagatgttcgggtccgtttacgagcacgaggagaaaaagcccatggaggcgttcgctgaacggttgcgagatgccgtggcattcggcgcctacatcgacggcgagatcattgggctgtcggtcttcaaacaggaggacggccccaaggacgctcacaaggcgcatctgtccggcgttttcgtggagcccgaacagcgaggccgaggggtcgccggtatgctgctgcgggcgttgccggcgggtttattgctcgtgatgatcgtccgacagattccaacgggaatctggtggatgcgcatcttcatcctcggcgcacttaatatttcgctattctggagcttgttgtttatttcggtctaccgcctgccgggcggggtcgcggcgacggtaggcgctgtgcagccgctgatggtcgtgttcatctctgccgctctgctaggtagcccgatacgattgatggcggtcctgggggctatttgcggaactgcgggcgtggcgctgttggtgttgacaccaaacgcagcgctagatcctgtcggcgtcgcagcgggcctggcgggggcggtttccatggcgttcggaaccgtgctgacccgcaagtggcaacctcccgtgcctctgctcacctttaccgcctggcaactggcggccggaggacttctgctcgttccagtagctttagtgtttgatccgccaatcccgatgcctacaggaaccaatgttctcggcctggcgtggctcggcctgatcggagcgggtttaacctacttcctttggttccgggggatctcgcgactcgaacctacagttgtttccttactgggctttctcagcccccgagcgcttagtgggaatttgtaccccttatcgaaccgggagcacaggatgacgcctaacaattcattcaagccgacaccgcttcgcggcgcggcttaattcaggagttaaacatcatgagggaagcggtgatcgccgaagtatcgactcaactatcagaggtagttggcgtcatcgagcgccatctcgaaccgacgttgctggccgtacatttgtacggctccgcagtggatggcggcctgaagccacacagtgatattgatttgctggttacggtgaccgtaaggcttgatgaaacaacgcggcgagctttgatcaacgaccttttggaaacttcggcttcccctggagagagcgagattctccgcgctgtagaagtcaccattgttgtgcacgacgacatcattccgtggcgttatccagctaagcgcgaactgcaatttggagaatggcagcgcaatgacattcttgcaggtatcttcgagccagccacgatcgacattgatctggctatcttgctgacaaaagcaagagaacatagcgttgccttggtaggtccagcggcggaggaactctttgatccggttcctgaacaggatctatttgaggcgctaaatgaaaccttaacgctatggaactcgccgcccgactgggctggcgatgagcgaaatgtagtgcttacgttgtcccgcatttggtacagcgcagtaaccggcaaaatcgcgccgaaggatgtcgctgccgactgggcaatggagcgcctgccggcccagtatcagcccgtcatacttgaagctaggcaggcttatcttggacaagaagatcgcttggcctcgcgcgcagatcagttggaagaatttgttcactacgtgaaaggcgagatcaccaaggtagtcggcaaataatgtctaacaattcgttcaagccgacgccgcttcgcggcgcggcttaactcaagcgttagagagctggggaagactatgcgcgatctgttgaaggtggttctaagcctcgtcttgcgatggcatttcgatccattcccattccgcgctcaagatggcttcccctcggcagttcatcagggctaaatcaatctagccgacttgtccggtgaaatgggctgcactccaacagaaacaatcaaacaaacatacacagcgacttattcacacgagctca

SEQ ID NO: 67 - DNA, 36590 bp, Artificial sequence
  plasmid pDAB9159
aattacaacggtatatatcctgccagtcagcatcatcacaccaaaagttaggcccgaatagtttgaaattagaaagctcgcaattgaggtctacaggccaaattcgctcttagccgtacaatattactcaccggatcctaaccggtttaattaaggcgcgccatgcccgggcaagcggccgcacaagtttgtacaaaaaagcaggcttctagacctaggtggagtcatcacgcagactatctcagcatgtgcgtagcacgcggccgcagcttatagtaaagatttttttgttaataaaatgaaagttaatatttatggatttatttgaacatatttacaagtttttgttaataaatttatttacagaagtgttaaatttgaaaatgtgttaaatgagagttaatatttatggatataatattactttatttaaaaataaaatgaatttatattaaaatatgatttggtaaaagatattataaagaggaacttggatgagaaagacgacgatgggcaaaagttgcatggcacaccgcttttgttcagtaacatctgcactgtggcgcctttttcacactcaccatgcatgctgccacgtcagctttcacactatgacaccactggccatacacgttgccacctcagctttctcctcttctcactatgacacgactggccatgcatgcatgcatgctgccacctcagctcccgcctcttcacccgtgtctttctctcatgtcgcagtgctgcgtgccaacctcttctctctataaatagagagaagagaatgatggttaaactcaaaccaaaacaagaaaacatacacaaatagcaaaacggatccacaaccaaaaatggcagcgaggctgcaagagcagaaaggaggtgagatggacacgaggattgcgatcataggcatgagcgccatacttccttgtggaaccacggtgagagagtcatgggagaccataagggctggcattgattgcctgtctgatcttcctgaggatcgtgttgatgtgactgcgtactttgacccagtcaagaccacaaaggacaaaatctactgcaagagaggaggtttcattcctgagtatgactttgatgcgcgtgagtttggtctcaacatgttccagatggaagattctgatgcgaatcagaccatctcacttctcaaggtcaaagaagcacttcaagatgctgggattgatgcacttggaaaggagaagaaaaacataggatgcgtgcttggcattggaggtggacagaagagttcacatgagttctacagcagactcaactatgtggttgtggagaaagtcttgagaaagatggggatgccagaggaagatgtcaaagtggctgtggagaagtacaaagcgaacttcccagaatggagacttgactctttccctggattccttgggaatgtcactgctggcagatgcaccaacacattcaacttggatggcatgaactgcgttgtggatgctgcatgtgcaagctccttgatagcagtcaaggttgcgattgatgaactgctctatggtgactgcgacatgatggtcactggtgcaacctgcacagacaactccattgggatgtacatggctttctcaaagacacctgtgttcagcacggacccaagtgtgagagcgtatgatgagaaaacgaaagggatgctcattggtgagggatcagccatgttggtgctcaaacgttatgcagatgcagtgagggatggtgatgagattcatgctgtgattcgtggttgtgcaagctcaagtgatggcaaagcagctggcatctacactcccacaatcagtggtcaagaggaagccttgagacgtgcatacaatcgtgcctgcgttgaccctgccactgtcactttggttgagggtcatgggactggcactccagttggagataggattgagttgactgcgttgaggaacttgtttgacaaagcgtatggtgaagggaacacagagaaagttgcagttggaagtatcaagtccagtattggtcatttgaaggctgttgctggtcttgctggaatgatcaaggtcatcatggctctcaaacacaagactttgcctggaacgatcaatgtggacaatccacccaatctctatgacaacactcccatcaatgagtcatccctctacatcaacacgatgaacagaccctggttccctccacctggtgttccgagacgtgctggaatatccagctttggctttggaggtgccaactaccatgcagtgttggaagaggctgaaccagagcacacgacagcgtacagactcaacaaacgtccacaaccggtgttgatgatggctgcaactcctgctgcgttgcagagcctttgtgaagctcagctgaaagagtttgaagctgcgatcaaggagaatgagacagtcaagaatactgcctacatcaagtgtgtcaagtttggagaacagttcaagttccctgggagcatacctgcgaccaatgcgagactgggattcttggtcaaagatgcggaggatgcgtgctccacgcttcgtgctatatgtgctcagtttgccaaagatgtgaccaaagaagcgtggaggcttccgagagaaggagtttctttccgtgccaaaggcattgccaccaatggtgctgttgctgcactcttctctggacaaggtgctcagtacacacacatgttcagtgaagttgcgatgaactggcctcagttcagacagtccattgctgcaatggacgctgcacagtccaaggttgctggaagtgacaaagactttgaaagagtctctcaagtcctgtacccaaggaaaccgtacgaacgtgagccagaacaagatcacaagaaaatctcactcacagcatacagccagccgtcaaccctggcatgtgctcttggtgcctttgagattttcaaggaagctggattcactccagactttgcagctggacacagcttgggtgagtttgctgcgctctatgcagctggttgtgttgacagagatgagttgtttgaacttgtttgcagaagggcaaggatcatgggaggcaaagatgcacctgccacacccaaaggttgcatggcagctgtcataggacccaacgcagagaacatcaaggttcaagctgccaacgtctggcttggaaactcaaactctccgtctcagactgtcattactgggtctgttgaagggattcaagctgaaagtgccagattgcagaaggaagggttcagagttgtgcctcttgcttgtgagtctgccttccattctccacagatggaaaatgccagctcagctttcaaagatgtcatatccaaggtttccttccgtacacccaaagcagaaacaaagctcttcagcaatgtttctggagagacctatccgacggatgccagagagatgctcactcaacacatgacctcatctgtgaagttcctgacccaagtgaggaacatgcaccaagctggtgcgagaatctttgttgagtttggaccgaaacaagttctcagcaaacttgtttctgaaaccctcaaagatgacccgtctgttgtcacagtgtctgtgaacccagcttctggcacggactctgacatacagttgagggatgctgcagttcagctggttgtggctggtgtcaatcttcaagggtttgacaagtgggatgctcctgatgccacgaggatgcaagccatcaagaaaaagagaaccacactcagactttcagctgccacctatgtcagtgacaagaccaagaaagtgagggatgctgccatgaacgacggaagatgtgtcacatacctcaagggtgctgcaccactcatcaaggctcctgaacctgtggttgacgaagctgccaagagggaggctgaaaggcttcagaaggagcttcaagacgctcagaggcagcttgacgacgccaaacgtgcagctgcagaagccaactccaaacttgctgctgccaaggaggaagccaagactgctgcagcttcagccaagcctgcagttgacactgctgttgtggagaaacatcgtgccatcctcaagtccatgctggctgagctggatggttatggaagtgttgatgcttcttcccttcagcaacagcaacagcaacagactgctccggcgcctgttaaagccgctgcccctgccgctcccgttgcaagtgctcctgctcccgccgtgtccaacgagttgcttgagaaagctgagacagttgtgatggaggttctcgctgccaagactggatacgaaacagacatgattgaggcggacatggagcttgagactgagttgggaattgacagcatcaagagggttgaaattctttctgaagtccaagctatgcttaacgttgaggcgaaagatgttgatgctctctctaggacgagaacagtgggtgaagttgtcaacgctatgaaggcagaaatcgctggttcttccgctccggcgccggcagctgccgcacctgcaccggctaaagcggctccagctgcagctgcaccagctgtttctaatgagctgctcgaaaaggcagaaactgttgtgatggaagtccttgctgccaaaactggctacgaaactgacatgatagaatcagacatggagcttgagacggagcttggaattgattccatcaagcgtgtggaaatcctcagtgaagtccaagccatgctcaatgtggaagctaaggatgtggatgctctctcaaggaccagaactgtcggtgaggttgtcaatgccatgaaggctgagatagctggaggctccgctcctgcgccggccgctgccgctcctggtcccgctgccgcggctccagctccagctgcagccgctccggccgtctcaaacgaactccttgaaaaagctgagaccgtcgtgatggaggtcttggcagctaaaaccggctatgagactgacatgattgagtctgacatggaattggagacagaacttgggatagacagcatcaaacgtgttgaaatcctcagtgaggtccaagctatgctgaacgtggaagcgaaggatgttgatgctctgtccagaacgaggaccgttggtgaggttgtggatgccatgaaggctgaaattgctggagggtctgcgcccgcgccagctgcagccgctcctgcacccgcagccgcggcacctgctccagctgcacctgcacctgccgtttcttcagaactcttggagaaggctgagacggttgtgatggaggttttggctgcaaagactggctatgagaccgacatgattgaatctgatatggaattggagacagagcttgggatcgattccatcaaaagagtggagatcctgagtgaagtccaagccatgctcaatgttgaagctaaggatgttgatgcactttcaagaacaaggacagtgggtgaggttgtggatgccatgaaggcggagattgctggagggagcgcgcctgcgccagctgccgcggcacctgcaccggcagccgcagctccagctccagctgcaccagcaccggccgcgcccgcgccagctgtttcatccgaactcctggaaaaggccgagacggttgtgatggaggtgctcgcagctaagactggttacgagaccgacatgattgaaagtgacatggagcttgaaaccgagttgggaatagatagcatcaaacgtgttgaaatcttgtctgaggtccaagctatgttgaacgtggaggcaaaagatgtcgatgcgctttcaagaaccagaacagtcggtgaggtcgtggacgccatgaaggctgaaattgccggaagctctgctagtgcgccagctgcagccgcacctgcacctgctgccgcggcacctgctccagctgcagccgctcctgccgtcagcaatgagttgctggagaaagccgaaacagttgtgatggaagtccttgctgcaaaaactggttacgaaacggacatgattgagtcagacatggaattggagaccgaacttggaatagattccatcaagagagtggagatcctctctgaggtgcaagccatgctcaacgttgaggctaaagatgttgatgcactcagtaggacaagaactgtgggggaagttgtcgatgcgatgaaggctgagattgctggaggctctgctcctgcgccggcagctgccgcacctgcacccgcagccgcggcaccagctgtcagcaacgaattgcttgagaaggctgaaacagttgtcatggaagtgctggctgcaaaaaccggctatgagactgacatgattgagtctgacatggaacttgagacggaattgggcattgacagcatcaagcgtgttgagatcctcagtgaagtccaagcaatgctcaatgtggaggctaaggatgtggatgccctctcaaggaccagaacagttggtgaggtcgttgatgcgatgaaggcggagatcgctggaagttccgcgcctgcgccagctgcagccgctcctgcacccgcagccgcggcaccggctccagctgcagccgcaccggccgtctcctcagaactcctggaaaaggctgagacagttgtgatggaagtccttgctgcgaaaactggctatgagaccgacatgattgaatctgacatggaactggagaccgagcttggaattgactccatcaaacgtgttgaaatcctctctgaggttcaagcgatgttgaatgtggaggccaaagatgttgatgctctttccagaacaaggacggtgggagaggtggttgatgccatgaaggctgagatagctgggggttctgctcctgcgccagctgcagccgctcctgctcccgctgccgcggcaccagctgtcagcaacgaactccttgaaaaagctgaaactgttgtgatggaggttttggctgcaaagactggatacgagactgacatgatagagtcagacatggagttggaaacagagcttgggattgatagcatcaagcgtgtggaaatcctttctgaggttcaagccatgctgaacgttgaggccaaagatgtcgatgctttgtcaaggaccagaacggttggagaagtggtcgatgccatgaaggctgagatagctggtggatcagcccctgctccggctgcagccgctcctgcaagtgccggtgctgcaccagctgtgaagattgattcagttcatggtgctgactgtgacgatttgtcactgatgcacgcaaaggtggttgacatcagaaggccagatgaactgattctggaaagaccggagaaccgtccagttcttgtcgttgacgatggctcagagttgacacttgctcttgtgagggtgttgggagcctgtgcagttgtcttgacctttgagggattgcagttggctcagagagctggtgcagctgccattcgtcatgttctggctaaggacctttcagcagaatcagctgagaaggccatcaaagaggctgagcaaagatttggagcgttgggaggcttcataagccagcaagcagaaaggtttgaaccagctgagatactgggtttcacactcatgtgtgcgaagtttgccaaagcctctctctgcactgctgtggctggaggtcgtcctgccttcatcggtgtggctaggcttgacggcagacttggattcacctctcaaggcacttctgacgcactcaagagagcacagcgtggagcgatctttggactctgcaagacaatagggttggagtggtcagaatctgatgtgttcagccgtggtgtggacattgctcaagggatgcacccagaagatgctgcagttgccatagttagggagatggcgtgtgctgacatcagaatcagagaggttgggattggagcaaaccagcaaagatgcacaatcagagctgccaagttggagactgggaaccctcagagacagatagcgaaagacgatgtgcttctggtttctggaggtgctcgtgggatcacacctctttgcatccgtgagatcacgcgtcagattgctggaggcaagtacattctgttgggtcgtagcaaagtttctgcgtctgaaccagcatggtgtgctggcatcactgatgagaaggctgtgcagaaagctgccacccaagagttgaagagggccttcagtgctggtgaaggacccaaacccactccaagggctgtcacgaaacttgtgggatctgttcttggtgctcgtgaagtgagaagctccattgctgccattgaagctctgggtggcaaagcgatctacagctcttgtgatgtgaactctgctgcagatgttgccaaagcagttagggatgcagagtcccagcttggtgccagagttagtggaatcgttcacgcttctggtgtgctccgtgatcgtctcatagagaagaaactccctgacgagtttgatgctgtctttgggaccaaagtcactgggttggagaatcttctggctgcagttgatcgtgccaacctcaaacacatggttctcttcagctcccttgctggtttccacggcaatgttggtcagtctgactatgcgatggcaaacgaagctctcaacaagatgggtttggaacttgcgaaggatgtcagtgtcaagtccatctgctttggtccctgggatggtgggatggtgacacctcaactcaagaaacagtttcaagaaatgggagttcagatcattcctcgtgaaggaggtgctgatacagttgcgaggattgtgttgggatcaagtcctgctgagatccttgttggaaactggaggacaccatccaagaaagttggaagtgacacgatcaccctgcatagaaagatcagtgccaagtccaatcccttcttggaggatcatgtcatacaaggcagaagggtgttgccaatgacccttgctattgggagccttgctgagacctgccttggactcttccctggctactctctctgggccatagatgacgcacagctcttcaaaggtgtcactgttgatggagacgtcaactgtgaagtgaccctcacaccgtccactgctccgagtgggagggtgaatgtccaagcgacgctcaagacgttctcaagtggaaaacttgttccagcctacagagctgtcatagtgttgtccaaccaaggtgctccacctgccaatgcaaccatgcagcctccgagccttgatgcagatcctgctttgcaagggtcagtctatgatggcaagactctctttcatggtcctgcgttcagaggcattgatgacgttctcagctgcaccaagagccagcttgttgccaagtgttctgctgttcctggatcagatgcagccagaggagagtttgcaactgacactgatgcacatgatccctttgtcaatgatcttgcctttcaagcaatgttggtctgggtgaggagaacgctgggacaagctgcactcccgaactccattcagaggatagtccaacacagaccggtcccacaagacaaacccttctacatcaccctcagatccaatcagagtggtggacatagccagcacaaacatgcacttcagttccacaacgaacaaggtgatctcttcattgatgttcaagcctctgtcattgcgacagactcacttgcgttctgagtagttagcttaatcacttaggtcacctttaaacggtcgcagcgtgtgcgtgtccgtcgtacgttctggccggccgggccttgggcgcgcgatcagaagcgttgcgttggcgtgtgtgtgcttctggtttgctttaattttaccaagtttgtttcaaggtggatcgcgtggtcaaggcccgtgtgctttaaagacccaccggcactggcagtgagtgttgctgcttgtgtaggctttggtacgtatgggctttatttgcttctggatgttgtgtactacttgggtttgttgaattattatgagcagttgcgtattgtaattcagctgggctacctggacattgttatgtattaataaatgctttgctttcttctaaagatctttaagtgctcggccggccttggccacggtggccagatccactagaggcgcgcctctagtgcggccgcttaattaagatgagtgatactcaggactcaggactcactctgctgatcactagtgctagcctcgaggtcgacacaactttgtatacaaaagttgtctagacctaggctcagcaactcatccagtcaagttcgagtcagtgagttgggcggccgcctcccagtatcattatagtgaaagttttggctctctcgccggtggttttttacctctatttaaaggggttttccacctaaaaattctggtatcattctcactttacttgttactttaatttctcataatctttggttgaaattatcacgcttccgcacacgatatccctacaaatttattatttgttaaacattttcaaaccgcataaaattttatgaagtcccgtctatctttaatgtagtctaacattttcatattgaaatatataatttacttaattttagcgttggtagaaagcataatgatttattcttattcttcttcatataaatgtttaatatacaatataaacaaattctttaccttaagaaggatttcccattttatattttaaaaatatatttatcaaatatttttcaaccacgtaaatctcataataataagttgtttcaaaagtaataaaatttaactccataatttttttattcgactgatcttaaagcaacacccagtgacacaactagccatttttttctttgaataaaaaaatccaattatcattgtattttttttatacaatgaaaatttcaccaaacaatgatttgtggtatttctgaagcaagtcatgttatgcaaaattctataattcccatttgacactacggaagtaactgaagatctgcttttacatgcgagacacatcttctaaagtaattttaataatagttactatattcaagatttcatatatcaaatactcaatattacttctaaaaaattaattagatataattaaaatattacttttttaattttaagtttaattgttgaatttgtgactattgatttattattctactatgtttaaattgttttatagatagtttaaagtaaatataagtaatgtagtagagtgttagagtgttaccctaaaccataaactataagatttatggtggactaattttcatatatttcttattgcttttaccttttcttggtatgtaagtccgtaactggaattactgtgggttgccatgacactctgtggtcttttggttcatgcatggatcttgcgcaagaaaaagacaaagaacaaagaaaaaagacaaaacagagagacaaaacgcaatcacacaaccaactcaaattagtcactggctgatcaagatcgccgcgtccatgtatgtctaaatgccatgcaaagcaacacgtgcttaacatgcactttaaatggctcacccatctcaacccacacacaaacacattgcctttttcttcatcatcaccacaaccacctgtatatattcattctcttccgccacctcaatttcttcacttcaacacacgtcaacctgcatatgcgtgtcatcccatgcccaaatctccatgcatgttccaaccaccttctctcttatataatacctataaatacctctaatatcactcacttctttcatcatccatccatccagagtactactactctactactataataccccaacccaactcatattcaatactactctaggatccacaaccaaaaatggctgcaaggaacgtgagtgcggctcatgagatgcatgacgagaagaggatagctgttgtgggcatggctgttcagtatgctggatgcaaaacgaaagacgagttctgggaagttctcatgaatggaaaagttgagagcaaagtgatcagcgacaaacgtcttggttcaaattaccgtgctgaacactacaaagctgaaaggagcaagtatgctgacaccttctgcaatgagacatatggaactcttgatgagaacgaaatagacaatgagcatgaactccttttgaaccttgccaaacaagccttggctgaaacatctgtcaaagattcaacaagatgtggcatagtttctggatgcctcagcttcccgatggacaacctccaaggtgaactcttgaatgtgtaccagaaccatgttgagaagaaacttggtgccagagttttcaaagatgcctctcactggtcagaaagagaacagtccaacaaaccagaggctggtgacagaagaatcttcatggaccctgcttcctttgttgctgaggaactcaatcttggcgctctccactactctgttgatgctgcctgtgccactgcgctctatgtgctcagactggcgcaagatcacttggtctctggtgcagctgatgtgatgctttgtggtgcaacatgcctgccggagccgtttttcatactctctgggttctcaaccttccaagccatgcctgttggaacgggtcagaatgtgtccatgccgctgcacaaagattctcaaggattgacccctggtgaaggaggttccatcatggtcctcaaacgtttggatgacgcaatcagagatggagatcacatctatggaacacttttgggagccaatgtcagcaacagtggcactggtctgccacttaaaccccttttgccgtcagagaaaaagtgcctcatggacacctacacacgtatcaatgtgcatccccacaagattcagtatgttgaatgccatgcaactgggactccacaaggtgatcgtgtggaaattgatgctgtgaaggcttgctttgaaggcaaagtcccacgttttggaaccacaaaagggaactttggacacacattggtggcagctgggtttgctggcatgtgcaaagtgcttctctccatgaagcacgggatcattccacccactccgggaatagatgacgaaacgaagatggaccctctggttgtctctggtgaggccattccctggccagaaacgaatggagaaccgaagcgtgctggtctctcagcgtttggatttggtgggaccaatgctcatgctgtctttgaggaacatgacccaagcaatgctgcatgcactggccatgactccatttctgctctctctgcacgttgtggtggtgagtcaaacatgagaatagcaatcactgggatggatgccacttttggtgctttgaaaggattggatgcttttgaaagggccatctacactggtgctcatggtgctataccactcccagaaaagagatggagattcctggggaaagacaaggacttccttgatctttgtggagtcaaagcaacaccgcatggctgttacattgaagatgttgaagttgatttccagaggctgaggactccaatgactcctgaagatatgctcttgcctcaacagcttctggctgtcaccacaattgatagggccatattggactctggcatgaagaaaggtggaaatgtggctgtctttgtggggttggggaccgatcttgaactctaccgtcaccgtgcaagggttgctctcaaggagagagtgaggcctgaagccagcaagaaactcaatgacatgatgcagtacatcaatgattgtgggacaagcacttcttacaccagctacataggcaacttggttgcaacaagggtcagttcacaatggggcttcacgggaccttccttcacaatcacagaaggcaacaattctgtgtacagatgtgctgaacttggcaaatacctcttggaaacgggagaggttgatggggttgtggttgcgggtgttgatctctgtgggagtgctgagaacctttacgtcaagtcaaggcgtttcaaggtgtctacatctgacaccccgagagccagctttgatgcagctgctgatggttactttgttggagagggctgtggtgcatttgtgctcaagcgtgagacaagctgcaccaaggatgacagaatctatgcttgcatggatgccatagttcctggaaatgttccatctgcatgtttgagagaggcattggatcaagccagagtcaagcctggagacatcgagatgttggagctttctgctgattcagcgaggcatttgaaggacccgtctgttctcccaaaggaactcactgctgaggaagagattggcggacttcagacgattcttcgtgacgatgacaagctcccaaggaatgttgcaactggaagtgtcaaggccactgttggtgacactggttatgcttctggtgctgccagtttgattaaggctgcgctttgcatctacaaccgttacctgcccagcaatggagatgactgggatgaacctgcacctgaagcaccctgggacagcacactctttgcgtgccagacctcaagagcttggttgaagaaccctggtgagagacgttatgcggctgtttccggagtcagtgaaaccagaagttgctacagtgtgctgctttctgaagcagagggacactacgagagagagaacagaatcagtttggatgaggaagcacccaagctcattgtgttgagagcagactcccatgaagagattcttggaagattggacaagataagggaaaggttcttgcagcccacgggtgctgcacccagagagtctgaattgaaggcgcaagcccgtaggatctttcttgaactccttggtgagacccttgcccaagatgcagcttcatctggaagtcagaagccccttgctctcagcttggtctccactccatccaagctccagagagaggtggaacttgcggcaaaaggcattccgagatgtctcaagatgagacgtgattggagttcccctgctggaagcagatatgcgcctgagcctttggccagtgacagagttgccttcatgtatggagaaggaaggagcccttactatggcatcacacaagacattcataggatttggcctgaacttcatgaggtcatcaatgagaaaacaaaccgtctctgggctgaaggtgacagatgggtcatgccaagggccagcttcaagagtgagcttgagtcacaacagcaagagtttgacagaaacatgattgaaatgttccgtcttggaatcctcacctcaattgccttcacaaacctggcgagagatgttctcaacatcacgcccaaagcagcctttggactcagtttgggagagatttccatgatctttgctttctccaagaaaaacggtttgataagcgatcagttgacaaaggatttgagagagtcagatgtctggaacaaagctctggctgttgagttcaatgcgctcagagaagcctggggcattccacagtctgtcccaaaagatgagttctggcaaggttacatagtgaggggaacgaaacaagacatagaagcagccatagcaccagactcaaagtatgtgaggttgaccatcatcaatgatgccaacactgctctcatcagtggaaagcctgatgcatgcaaagctgcgattgctcgtcttggtggcaacatccctgcgcttccagtcactcaaggcatgtgtgggcattgcccagaggtgggaccttacaccaaggacatcgcaaagatccacgccaaccttgagttccctgtggttgatggtcttgatctctggactaccataaaccagaagaggcttgtgccaagagccacgggtgccaaagatgaatgggctccttcatcctttggggagtatgctggacagctctatgagaaacaagccaacttccctcagatagttgaaaccatctacaagcagaactatgatgtgtttgttgaagttgggccaaacaatcacagaagcacagcagtgagaaccacgcttggaccacagagaaaccaccttgctggtgccatagacaagcagaacgaggatgcttggacgacaatagtcaagctcgtggcttcattgaaggctcaccttgttcctggagtgaccatcagtccgctctaccactccaagctcgttgcagaggctgaggcttgttatgctgcgctctgtaaaggtgagaaacccaagaaaaacaagtttgtgagaaagattcagttgaatggcagattcaacagcaaggcagaccccatctcctcagcagaccttgcatccttcccacctgcggaccctgcgattgaagctgccatctcttcaaggatcatgaagcctgtggctccgaaattctatgcgcgtctcaacattgatgagcaagatgagaccagagatccgatcttgaacaaggacaatgcgccttccagctccagctcttccagcagttcctcttccagcagttcatctccgtctcctgctccttcagctccagttcagaagaaagctgccccagctgcggagacaaaagctgttgccagtgctgatgcacttcgtagtgccctgcttgatcttgactccatgcttgcgctcagctctgcaagtgcttctggcaaccttgttgagactgcgccatctgatgccagtgtcattgtccctccgtgcaacattgctgatcttggcagcagagctttcatgaaaacttatggtgtttctgcgcctctgtacaccggtgcaatggccaagggaattgcctctgcggacttggtgatcgcagctggaaggcaaggaatccttgcgtcatttggtgctggaggccttccaatgcaagttgtgcgtgagtccattgaaaagattcaagctgccctgcccaatggaccatatgctgtcaacctcatccattctccttttgacagcaaccttgagaagggaaatgttgatctcttcttggaaaagggtgtcacttttgttgaggcttcagccttcatgacgttgacaccgcaagttgtcagatacagagcggctgggttgacgaggaatgcagatgggtcagtcaacataaggaacagaatcattgggaaagtctccagaactgagctggctgaaatgttcatgcgtcctgcacctgagcatcttttgcagaagctcattgcttctggggagatcaatcaagaacaagctgagttggccagacgtgttcctgtggctgatgacattgcggttgaagctgattctggtggacacactgacaaccgtccaatccatgtcattctgcctctgattatcaacctgagggataggcttcacagagagtgtggatacccagcaaacctgagggttcgtgttggtgctgggggtggcattgggtgtccccaagctgcgctggcaactttcaacatgggtgcctctttcattgtcactggaacagtgaaccaagttgccaaacaatctgggacgtgtgacaatgtgaggaaacagcttgcgaaagcaacttactcagatgtttgcatggcaccggcagctgacatgtttgaggaaggtgtgaaacttcaagttttgaagaaaggaacaatgttcccttcaagagccaacaaactctatgagttgttctgcaagtatgattcttttgagtccatgcctccagcagagcttgcgagggttgagaaaagaatcttcagtcgtgcattggaagaggtctgggatgagaccaagaacttctacatcaaccgtctccacaacccagagaagatacagagggctgagagggaccccaaactgaagatgtcactgtgtttcagatggtatctgtccctggcttcaaggtgggccaacactggagcttctgacagagtcatggactaccaagtttggtgtggtcctgccattggttcattcaatgatttcatcaaaggaacttaccttgatccggcagtggcaaatgagtacccgtgtgttgtgcagatcaacaaacagattcttagaggagcgtgcttcttgaggcgtcttgaaatactgagaaatgcaaggctttcagatggtgcagctgcacttgtggcgagcattgatgacacatatgtccctgctgagaagctgtgagtagttagcttaatcacttaggtcacctttaaacggtcgcagcgtgtgcgtgtccgtcgtacgttctggccggccgggccttgggcgcgcgatcagaagcgttgcgttggcgtgtgtgtgcttctggtttgctttaattttaccaagtttgtttcaaggtggatcgcgtggtcaaggcccgtgtgctttaaagacccaccggcactggcagtgagtgttgctgcttgtgtaggctttggtacgtatgggctttatttgcttctggatgttgtgtactacttgggtttgttgaattattatgagcagttgcgtattgtaattcagctgggctacctggacattgttatgtattaataaatgctttgctttcttctaaagatctttaagtgctcggccggccttggccacggtggccagatccactagaggcgcgcctctagtgcggccgcttaattaatctgacctgaccactagacctgagtgagtacagatgtgctactagtgctagcctcgaggtcgaccaacttttctatacaaagttgtctagacctaggactaggcactgagtgactcactgacctgactgagtgactggcggccgcagcttatagtaaagatttttttgttaataaaatgaaagttaatatttatggatttatttgaacatatttacaagtttttgttaataaatttatttacagaagtgttaaatttgaaaatgtgttaaatgagagttaatatttatggatataatattactttatttaaaaataaaatgaatttatattaaaatatgatttggtaaaagatattataaagaggaacttggatgagaaagacgacgatgggcaaaagttgcatggcacaccgcttttgttcagtaacatctgcactgtggcgcctttttcacactcaccatgcatgctgccacgtcagctttcacactatgacaccactggccatacacgttgccacctcagctttctcctcttctcactatgacacgactggccatgcatgcatgcatgctgccacctcagctcccgcctcttcacccgtgtctttctctcatgtcgcagtgctgcgtgccaacctcttctctctataaatagagagaagagaatgatggttaaactcaaaccaaaacaagaaaacatacacaaatagcaaaacggatccacaaccaaaaatggcgcttcgtgtcaagaccaacaagaagccatgttgggagatgaccaaggaggaactgacctctggcaaaactgaggtgttcaactatgaggaactcctggagtttgcagagggtgacatagctaaggtttttggtccggagtttgctgtcatagacaagtaccccagaagggtgaggctgcctgctcgtgaatacctgcttgtgacaagggtcacactcatggatgccgaggtcaacaactacagagttggtgccagaatggtcactgagtatgatcttccagtgaatggcgaattgtctgagggaggtgattgtccctgggcagttctggttgagagtggacagtgcgatttgatgctgatatcatacatgggaattgatttccagaaccaaggtgacagagtttaccgtctgctcaacaccacgttgacattctatggggttgcccatgagggagagacccttgagtatgacatcagagtgaccggttttgccaaacgtttggatggtggcatctccatgttcttctttgagtatgactgctatgtcaatgggaggcttctcattgagatgagagatggctgtgctggcttcttcacaaatgaggagcttgatgcgggaaagggtgtggtgttcacaagaggggatttggctgccagagctaagattccaaagcaagatgtttctccctatgctgtcgctccctgccttcacaaaacaaaactcaacgaaaaggagatgcagaccttggttgacaaagattgggcttccgtttttggctcaaagaatggcatgccggagatcaactacaaactctgcgcacgtaagatgctcatgattgatagagtcaccagcattgaccataagggaggtgtgtacggtttgggtcagttggttggtgagaaaatcttggagagggaccattggtacttcccatgccattttgttaaggatcaagtcatggctggatctcttgtcagcgacggttgttcacaaatgctcaagatgtacatgatctggctcggtttgcaccttaccaccggaccatttgacttcagacccgtcaacggacacccgaacaaagttaggtgtaggggtcagatatctcctcataagggaaagttggtctacgtcatggagatcaaagagatgggattcgacgaggataacgatccgtacgccattgctgacgtcaacatcattgacgttgatttcgaaaagggtcaagatttcagccttgatagaatcagcgactacggaaagggggatcttaacaaaaagatcgtcgtggacttcaagggcattgctctcaagatgcagaagagatccacgaacaagaacccctccaaagttcagcccgtttttgctaacggtgcagccactgtgggaccggaagcgtccaaggccagctctggtgccagtgctagtgcttctgctgcccctgcgaagcctgctttctcagcagatgttcttgcgccaaagccagttgcacttcctgaacatatcctcaagggtgacgctctcgctccgaaagaaatgtcctggcatcccatgtcaaaacttcctggcaacccgacgccgttcttctcccctagttcttaccctccgagggcaatttgcttcatccctttccctggcaacccacttgacaacaattgcaaagctggagaaatgcctctgaactggtacaacatgtcagagttcatgtgtggaaaagttagcaactgcttgggaccagagttcgcaagatttgataagtcaaatacgagcagaagccctgcttttgatttggctcttgtgactagagttgttgaagtcacaaacatggaacatggcaagttcctgaatgttgattgcaatcccagcaaaggcacaatggtgggggagtttgactgtcctcaagatgcgtggttctttgatggttcttgcaatgatgggcacatgccttattccatcatcatggaaatcggacttcagacatccggtgttctcaccagtgtgttgaaagcaccactgacgatggacaaagatgacattctctttaggaaccttgatgcaagtgctgaaatggtgaggccagatgtggatgtgagggggaaaaccataaggaatgtgaccaagtgcactggatatgcaatgttgggaaagatggggattcacagattcacgtttgagttgtctgttgatggcgtggttttctacaaaggaagcacttcctttggatggttcactccagaggtgtttgctcagcaagctggacttgacaatgggaaaaagacggagccttggtgcaaaactaacaacacgagtgtgagaagagttgaaatcgcatcagccaaaggcaaagaacagctgactgagaaacttccagatgcaactaatgctcaagttctcagaaggtcagaacagtgtgagtatttggattacctcaacattgctcctgattctgggctgcatgggaaaggatatgcgcatggacacaaagatgttaacccacaagactggttcttctcttgtcacttttggtttgatcctgtgatgcctggatctttgggaattgagtcaatgttccagctcattgaggcatttgcggtggaccagaacataccgggagaatacaatgtgagcaatccgacctttgcccatgcccctggaaaaacggcgtggaagtaccgtggtcaattgacaccaaagaaccgtgcgatggactgtgaggtgcacatagtttcaatcacagcctctcctgaaaatggaggctacgttgacatagtggcagatggagcactttgggttgatggtctccgtgtgtatgaagccaaagaactcagagttcgtgttgtcagtgcaaaacctcaagccattccggatgttcaacaacagccacccagcgcaaaagcggaccctgggaaaactggagttgcactcagtccgactcagttgagagatgtcctgcttgaagtggacaatccattgtatcttggtgttgaaaactccaatttggtgcagtttgaatccaaacctgcaacttcttcaaggattgtcagtatcaaaccatgctccataagtgatcttggtgacaagtccttcatggaaacgtacaatgtgtcagcacctctgtacactggagcaatggccaagggaattgcgtctgcggaccttgtcattgctgctgggaagaggaagatattgggttcttttggagcgggtgggcttccaatgcaccatgtgagggcagctttggagaagatacaagcggctctgcctcaaggaccatatgctgtgaacctcattcattcaccttttgacagcaacttggaaaaggggaatgttgatctcttcctcgaaaagggcgttactgtggtggaggcttctgcattcatgaccctcactccccaagttgttcgttaccgtgcagccggactctcaaggaacgctgatgggagtgtcaacatcagaaaccgtatcattggaaaagtgtccagaacagaactcgccgaaatgttcatcagaccggctccggaacacctccttgagaaactcatagcttctggtgagataacacaagaacaagccgaacttgcccgtcgtgttcctgtcgcagacgacatcgctgttgaagctgattctggtggtcacactgacaaccgtcccatccacgtcatcttgcctttgatcatcaaccttaggaacagactgcacagagagtgtggttatcctgcgcaccttagagtcagagttggagctggaggcggtgttggctgcccacaagctgctgcggctgccctcacaatgggagctgccttcatagtgactgggactgtcaatcaagttgctaaacagtccgggacatgtgacaacgtgagaaaacaactcagtcaagccacctacagtgacatttgcatggctccagcagctgatatgtttgaggaaggtgtgaaactccaagttctcaagaagggaacaatgttcccatcaagagctaacaaattgtacgaactcttttgcaagtacgactctttcgattcaatgcctcctgctgaacttgaaaggatcgagaagaggatcttcaagagggcacttcaagaggtctgggaagagaccaaggacttttacatcaatggtttgaagaatccagagaagatacagagagcggaacatgaccccaaactcaagatgtctttgtgtttcagatggtatcttggtcttgcatcacgttgggccaacatgggtgctcctgatcgtgtcatggactatcaagtctggtgtggtccagccattggagccttcaatgacttcatcaaaggaacatatcttgatcctgctgtctctaatgagtacccatgtgttgtccagatcaaccttcagattttgcgtggtgcatgttacctgaggcgtcttaatgctctgagaaatgatccgaggattgatcttgagactgaagatgctgcctttgtctatgagccaacgaatgcgctttgagtagttagcttaatcacttaggtcacctttaaacggtcgcagcgtgtgcgtgtccgtcgtacgttctggccggccgggccttgggcgcgcgatcagaagcgttgcgttggcgtgtgtgtgcttctggtttgctttaattttaccaagtttgtttcaaggtggatcgcgtggtcaaggcccgtgtgctttaaagacccaccggcactggcagtgagtgttgctgcttgtgtaggctttggtacgtatgggctttatttgcttctggatgttgtgtactacttgggtttgttgaattattatgagcagttgcgtattgtaattcagctgggctacctggacattgttatgtattaataaatgctttgctttcttctaaagatctttaagtgctcggccggccttggccacggtggccagatccactagaggcgcgcctctagtgcggccgcttaattaatcacgagtggatgactgtcacgactgactcatgactgactactagtgctagcctcgaggtcgacacaactttgtataataaagttgtctagacctaggagctgtgctgggtaactcacatgagtcactggtcacatcagcggccgcctcccagtatcattatagtgaaagttttggctctctcgccggtggttttttacctctatttaaaggggttttccacctaaaaattctggtatcattctcactttacttgttactttaatttctcataatctttggttgaaattatcacgcttccgcacacgatatccctacaaatttattatttgttaaacattttcaaaccgcataaaattttatgaagtcccgtctatctttaatgtagtctaacattttcatattgaaatatataatttacttaattttagcgttggtagaaagcataatgatttattcttattcttcttcatataaatgtttaatatacaatataaacaaattctttaccttaagaaggatttcccattttatattttaaaaatatatttatcaaatatttttcaaccacgtaaatctcataataataagttgtttcaaaagtaataaaatttaactccataatttttttattcgactgatcttaaagcaacacccagtgacacaactagccatttttttctttgaataaaaaaatccaattatcattgtattttttttatacaatgaaaatttcaccaaacaatgatttgtggtatttctgaagcaagtcatgttatgcaaaattctataattcccatttgacactacggaagtaactgaagatctgcttttacatgcgagacacatcttctaaagtaattttaataatagttactatattcaagatttcatatatcaaatactcaatattacttctaaaaaattaattagatataattaaaatattacttttttaattttaagtttaattgttgaatttgtgactattgatttattattctactatgtttaaattgttttatagatagtttaaagtaaatataagtaatgtagtagagtgttagagtgttaccctaaaccataaactataagatttatggtggactaattttcatatatttcttattgcttttaccttttcttggtatgtaagtccgtaactggaattactgtgggttgccatgacactctgtggtcttttggttcatgcatggatcttgcgcaagaaaaagacaaagaacaaagaaaaaagacaaaacagagagacaaaacgcaatcacacaaccaactcaaattagtcactggctgatcaagatcgccgcgtccatgtatgtctaaatgccatgcaaagcaacacgtgcttaacatgcactttaaatggctcacccatctcaacccacacacaaacacattgcctttttcttcatcatcaccacaaccacctgtatatattcattctcttccgccacctcaatttcttcacttcaacacacgtcaacctgcatatgcgtgtcatcccatgcccaaatctccatgcatgttccaaccaccttctctcttatataatacctataaatacctctaatatcactcacttctttcatcatccatccatccagagtactactactctactactataataccccaacccaactcatattcaatactactctaggatccacaaccaaaaatgcttcagcacacttggcttccgaagcctcccaatctgaccctcttgtcagatgaggttcatctctggaggattcctcttgaccagcctgagtcacaacttcaagaccttgctgccaccctgagcagtgatgaattggcgagggcaaacagattctactttccagaacacagaaggcgtttcactgctgggagaggcatcctcagatccatcttgggtggatacttgggagtggaaccgggtcaagtcaagtttgattatgagtcccgtgggaaaccgatccttggtgacagatttgctgagagtggactcctgttcaacttgtctcacagccagaaccttgccttgtgtgctgtcaactacacgcgtcaaataggcattgatcttgaatatctgcgtccaacatctgacttggagtctcttgcaaagaggttctttctcccaagagaatatgaactcttgaggtcactccctgatgagcagaaacagaagattttctttcgttactggacttgcaaagaggcttatctcaaagcaacgggagatggaatagccaaacttgaagagatcgagatagcactcaccccaacagaacctgccaagctccaaacagctcctgcgtggtctctgttggagcttgtgccagatgacaattgtgttgcagctgtggctgttgcgggttttggttggcagcccaagttctggcattactgagtagttagcttaatcacttaggtcacctttaaacggtcgcagcgtgtgcgtgtccgtcgtacgttctggccggccgggccttgggcgcgcgatcagaagcgttgcgttggcgtgtgtgtgcttctggtttgctttaattttaccaagtttgtttcaaggtggatcgcgtggtcaaggcccgtgtgctttaaagacccaccggcactggcagtgagtgttgctgcttgtgtaggctttggtacgtatgggctttatttgcttctggatgttgtgtactacttgggtttgttgaattattatgagcagttgcgtattgtaattcagctgggctacctggacattgttatgtattaataaatgctttgctttcttctaaagatctttaagtgctcggccggccttggccacggtggccagatccactagaggcgcgcctctagtgcggccgcttaattaactactgtcactgaggccgtagacgagtacggactgatctaactagtgctagcctcgaggtcgacacccagctttcttgtacaaagtggttgcggccgcttaattaaatttaaattcaattaatgcaatcttgattttcaacaacgaaggtaatggcgtaaaagaaaaaatgtatgttattgtattgatctttcatgatgttgaagcgtgccataatatgatgatgtataattaaaatattaactgtcgcattttattgaaatggcactgttatttcaaccatatctttgattctgttacatgacacgactgcaagaagtaaataatagacgccgttgttaaagaattgctatcatatgtgcctaactagagggaatttgagcgtcagacctaatcaaatattacaaaatatctcactctgtcgccagcaatggtgtaatcagcgcagacaaatggcgtaaagatcgcggaaaaacctccccgagtggcatgatagctgcctctgtattgctgatttagtcagccttatttgacttaagggtgccctcgttagtgacaaattgctttcaaggagacagccatgccccacactttgttgaaaaacaaattgcctttggggagacggtaaagccagttgctcttcaataaggaatgtcgaggaggcaatgtaaccgcctctggtagtacacttctctaatccaaaaatcaatttgtattcaagataccgcaaaaaacttatggtttaaaccctgcaggactagtccagaaggtaattatccaagatgtagcatcaagaatccaatgtttacgggaaaaactatggaagtattatgtaagctcagcaagaagcagatcaatatgcggcacatatgcaacctatgttcaaaaatgaagaatgtacagatacaagatcctatactgccagaatacgaagaagaatacgtagaaattgaaaaagaagaaccaggcgaagaaaagaatcttgaagacgtaagcactgacgacaacaatgaaaagaagaagataaggtcggtgattgtgaaagagacatagaggacacatgtaaggtggaaaatgtaagggcggaaagtaaccttatcacaaaggaatcttatcccccactacttatccttttatatttttccgtgtcatttttgcccttgagttttcctatataaggaaccaagttcggcatttgtgaaaacaagaaaaaatttggtgtaagctattttctttgaagtactgaggatacaacttcagagaaatttgtaagtttgtaggtaccagatctggatcccaaaccatgtctccggagaggagaccagttgagattaggccagctacagcagctgatatggccgcggtttgtgatatcgttaaccattacattgagacgtctacagtgaactttaggacagagccacaaacaccacaagagtggattgatgatctagagaggttgcaagatagatacccttggttggttgctgaggttgagggtgttgtggctggtattgcttacgctgggccctggaaggctaggaacgcttacgattggacagttgagagtactgtttacgtgtcacataggcatcaaaggttgggcctaggatctacattgtacacacatttgcttaagtctatggaggcgcaaggttttaagtctgtggttgctgttataggccttccaaacgatccatctgttaggttgcatgaggctttgggatacacagcccggggtacattgcgcgcagctggatacaagcatggtggatggcatgatgttggtttttggcaaagggattttgagttgccagctcctccaaggccagttaggccagttacccaaatctgagtagttagcttaatcacctagagctcgatcggcggcaatagcttcttagcgccatcccgggttgatcctatctgtgttgaaatagttgcggtgggcaaggctctctttcagaaagacaggcggccaaaggaacccaaggtgaggtgggctatggctctcagttccttgtggaagcgcttggtctaaggtgcagaggtgttagcgggatgaagcaaaagtgtccgattgtaacaagatatgttgatcctacgtaaggatattaaagtatgtattcatcactaatataatcagtgtattccaatatgtactacgatttccaatgtctttattgtcgccgtatgtaatcggcgtcacaaaataatccccggtgactttcttttaatccaggatgaaataatatgttattataatttttgcgatttggtccgttataggaattgaagtgtgcttgaggtcggtcgccaccactcccatttcataattttacatgtatttgaaaaataaaaatttatggtattcaatttaaacacgtatacttgtaaagaatgatatcttgaaagaaatatagtttaaatatttattgataaaataacaagtcaggtattatagtccaagcaaaaacataaatttattgatgcaagtttaaattcagaaatatttcaataactgattatatcagctggtacattgccgtagatgaaagactgagtgcgatattatggtgtaatacataggaattcgtttaaacgatctgcgtctaattttcggtccaacttgcacaggaaagacgtcgaccgcggtagctcttgcccagcagactgggcttccagtcctttcgctcgatcgggtccaatgttgtcctcagctgtgaaccggaagcggacgaccaacagtggaagaactgaaaggaacgagccgtctataccttgatgatcggcctctggtgaagggtatcatcgcagccaagcaagctcatgaaaggctgatgggggaggtgtataattatgaggcccacggcgggcttattctttagggaggatctatctcgttgctcaagtgcatggcgcaaagcagttattggagtgcggattttcgttggcatattattcgccacgagttagcagacgaagagaccttcatgaacgtggccaaggccagagttaagcagatgttacgccctgctgcaggcctttctattatccaatagttggttgatctttggaaagagcctcggctgaggcccatactgaaagagatcgatggatatcgatatgccatgttgtttgctagccagaaccagatcacatccgatatgctattgcagcttgacgcagatatggaggataagttgattcatgggatcgctcaggagtagctcatccatgcacgccgacaagaacagaaattccgtcgagttaacgcagccgcttacgacggattcgaaggtcatccattcggaatgtattagtttgcaccagctccgcgtcacacctgtcttcatttgaataagatgttagcaattgtttttagctttgtcttgttgtggcagggcggcaagtgcttcagacatcattctgttttcaaattttatgctggagaacagcttcttaattcctttggaaataatagactgcgtcttaaaattcagatgtctggatatagatatgattgtaaaataacctatttaagtgtcatttagaacataagttttatgaatgttcttccattttcgtcatcgaacgaataagagtaaatacaccttttttaacattacaaataagttcttatacgttgtttatacaccgggaatcatttccattattttcgcgcaaaagtcacggatattcgtgaaagcgacataaactgcgaaatttgcggggagtgtcttgagtttgcctcgaggctagcgcatgcacatagacacacacatcatctcattgatgcttggtaataattgtcattagattgtttttatgcatagatgcactcgaaatcagccaattttagacaagtatcaaacggatgtgacttcagtacattaaaaacgtccgcaatgtgttattaagttgtctaagcgtcaatttgatttacaattgaatatatcctgccccagccagccaacagctcgatttacaattgaatatatcctgccggccggcccacgcgtgtcgaggaattctgatctggcccccatttggacgtgaatgtagacacgtcgaaataaagatttccgaattagaataatttgtttattgctttcgcctataaatacgacggatcgtaatttgtcgttttatcaaaatgtactttcattttataataacgctgcggacatctacatttttgaattgaaaaaaaattggtaattactctttctttttctccatattgaccatcatactcattgctgatccatgtagatttcccggacatgaagccatttacaattgaatatatcctgccgccgctgccgctttgcacccggtggagcttgcatgttggtttctacgcagaactgagccggttaggcagataatttccattgagaactgagccatgtgcaccttccccccaacacggtgagcgacggggcaacggagtgatccacatgggacttttaaacatcatccgtcggatggcgttgcgagagaagcagtcgatccgtgagatcagccgacgcaccgggcaggcgcgcaacacgatcgcaaagtatttgaacgcaggtacaatcgagccgacgttcacgcggaacgaccaagcaagcttggctgccatttttggggtgaggccgttcgcggccgaggggcgcagcccctggggggatgggaggcccgcgttagcgggccgggagggttcgagaagggggggcaccccccttcggcgtgcgcggtcacgcgcacagggcgcagccctggttaaaaacaaggtttataaatattggtttaaaagcaggttaaaagacaggttagcggtggccgaaaaacgggcggaaacccttgcaaatgctggattttctgcctgtggacagcccctcaaatgtcaataggtgcgcccctcatctgtcagcactctgcccctcaagtgtcaaggatcgcgcccctcatctgtcagtagtcgcgcccctcaagtgtcaataccgcagggcacttatccccaggcttgtccacatcatctgtgggaaactcgcgtaaaatcaggcgttttcgccgatttgcgaggctggccagctccacgtcgccggccgaaatcgagcctgcccctcatctgtcaacgccgcgccgggtgagtcggcccctcaagtgtcaacgtccgcccctcatctgtcagtgagggccaagttttccgcgaggtatccacaacgccggcggccgcggtgtctcgcacacggcttcgacggcgtttctggcgcgtttgcagggccatagacggccgccagcccagcggcgagggcaaccagcccggtgagcgtcggaaagggtcgacggatcttttccgctgcataaccctgcttcggggtcattatagcgattttttcggtatatccatcctttttcgcacgatatacaggattttgccaaagggttcgtgtagactttccttggtgtatccaacggcgtcagccgggcaggataggtgaagtaggcccacccgcgagcgggtgttccttcttcactgtcccttattcgcacctggcggtgctcaacgggaatcctgctctgcgaggctggccggctaccgccggcgtaacagatgagggcaagcggatggctgatgaaaccaagccaaccaggaagggcagcccacctatcaaggtgtactgccttccagacgaacgaagagcgattgaggaaaaggcggcggcggccggcatgagcctgtcggcctacctgctggccgtcggccagggctacaaaatcacgggcgtcgtggactatgagcacgtccgcgagctggcccgcatcaatggcgacctgggccgcctgggcggcctgctgaaactctggctcaccgacgacccgcgcacggcgcggttcggtgatgccacgatcctcgccctgctggcgaagatcgaagagaagcaggacgagcttggcaaggtcatgatgggcgtggtccgcccgagggcagagccatgacttttttagccgctaaaacggccggggggtgcgcgtgattgccaagcacgtccccatgcgctccatcaagaagagcgacttcgcggagctggtattcgtgcagggcaagattcggaataccaagtacgagaaggacggccagacggtctacgggaccgacttcattgccgataaggtggattatctggacaccaaggcaccaggcgggtcaaatcaggaataagggcacattgccccggcgtgagtcggggcaatcccgcaaggagggtgaatgaatcggacgtttgaccggaaggcatacaggcaagaactgatcgacgcggggttttccgccgaggatgccgaaaccatcgcaagccgcaccgtcatgcgtgcgccccgcgaaaccttccagtccgtcggctcgatggtccagcaagctacggccaagatcgagcgcgacagcgtgcaactggctccccctgccctgcccgcgccatcggccgccgtggagcgttcgcgtcgtctcgaacaggaggcggcaggtttggcgaagtcgatgaccatcgacacgcgaggaactatgacgaccaagaagcgaaaaaccgccggcgaggacctggcaaaacaggtcagcgaggccaagcaggccgcgttgctgaaacacacgaagcagcagatcaaggaaatgcagctttccttgttcgatattgcgccgtggccggacacgatgcgagcgatgccaaacgacacggcccgctctgccctgttcaccacgcgcaacaagaaaatcccgcgcgaggcgctgcaaaacaaggtcattttccacgtcaacaaggacgtgaagatcacctacaccggcgtcgagctgcgggccgacgatgacgaactggtgtggcagcaggtgttggagtacgcgaagcgcacccctatcggcgagccgatcaccttcacgttctacgagctttgccaggacctgggctggtcgatcaatggccggtattacacgaaggccgaggaatgcctgtcgcgcctacaggcgacggcgatgggcttcacgtccgaccgcgttgggcacctggaatcggtgtcgctgctgcaccgcttccgcgtcctggaccgtggcaagaaaacgtcccgttgccaggtcctgatcgacgaggaaatcgtcgtgctgtttgctggcgaccactacacgaaattcatatgggagaagtaccgcaagctgtcgccgacggcccgacggatgttcgactatttcagctcgcaccgggagccgtacccgctcaagctggaaaccttccgcctcatgtgcggatcggattccacccgcgtgaagaagtggcgcgagcaggtcggcgaagcctgcgaagagttgcgaggcagcggcctggtggaacacgcctgggtcaatgatgacctggtgcattgcaaacgctagggccttgtggggtcagttccggctgggggttcagcagccagcgctttactggcatttcaggaacaagcgggcactgctcgacgcacttgcttcgctcagtatcgctcgggacgcacggcgcgctctacgaactgccgataaacagaggattaaaattgacaattgtgattaaggctcagattcgacggcttggagcggccgacgtgcaggatttccgcgagatccgattgtcggccctgaagaaagctccagagatgttcgggtccgtttacgagcacgaggagaaaaagcccatggaggcgttcgctgaacggttgcgagatgccgtggcattcggcgcctacatcgacggcgagatcattgggctgtcggtcttcaaacaggaggacggccccaaggacgctcacaaggcgcatctgtccggcgttttcgtggagcccgaacagcgaggccgaggggtcgccggtatgctgctgcgggcgttgccggcgggtttattgctcgtgatgatcgtccgacagattccaacgggaatctggtggatgcgcatcttcatcctcggcgcacttaatatttcgctattctggagcttgttgtttatttcggtctaccgcctgccgggcggggtcgcggcgacggtaggcgctgtgcagccgctgatggtcgtgttcatctctgccgctctgctaggtagcccgatacgattgatggcggtcctgggggctatttgcggaactgcgggcgtggcgctgttggtgttgacaccaaacgcagcgctagatcctgtcggcgtcgcagcgggcctggcgggggcggtttccatggcgttcggaaccgtgctgacccgcaagtggcaacctcccgtgcctctgctcacctttaccgcctggcaactggcggccggaggacttctgctcgttccagtagctttagtgtttgatccgccaatcccgatgcctacaggaaccaatgttctcggcctggcgtggctcggcctgatcggagcgggtttaacctacttcctttggttccgggggatctcgcgactcgaacctacagttgtttccttactgggctttctcagcccccgagcgcttagtgggaatttgtaccccttatcgaaccgggagcacaggatgacgcctaacaattcattcaagccgacaccgcttcgcggcgcggcttaattcaggagttaaacatcatgagggaagcggtgatcgccgaagtatcgactcaactatcagaggtagttggcgtcatcgagcgccatctcgaaccgacgttgctggccgtacatttgtacggctccgcagtggatggcggcctgaagccacacagtgatattgatttgctggttacggtgaccgtaaggcttgatgaaacaacgcggcgagctttgatcaacgaccttttggaaacttcggcttcccctggagagagcgagattctccgcgctgtagaagtcaccattgttgtgcacgacgacatcattccgtggcgttatccagctaagcgcgaactgcaatttggagaatggcagcgcaatgacattcttgcaggtatcttcgagccagccacgatcgacattgatctggctatcttgctgacaaaagcaagagaacatagcgttgccttggtaggtccagcggcggaggaactctttgatccggttcctgaacaggatctatttgaggcgctaaatgaaaccttaacgctatggaactcgccgcccgactgggctggcgatgagcgaaatgtagtgcttacgttgtcccgcatttggtacagcgcagtaaccggcaaaatcgcgccgaaggatgtcgctgccgactgggcaatggagcgcctgccggcccagtatcagcccgtcatacttgaagctaggcaggcttatcttggacaagaagatcgcttggcctcgcgcgcagatcagttggaagaatttgttcactacgtgaaaggcgagatcaccaaggtagtcggcaaataatgtctaacaattcgttcaagccgacgccgcttcgcggcgcggcttaactcaagcgttagagagctggggaagactatgcgcgatctgttgaaggtggttctaagcctcgtcttgcgatggcatttcgatccattcccattccgcgctcaagatggcttcccctcggcagttcatcagggctaaatcaatctagccgacttgtccggtgaaatgggctgcactccaacagaaacaatcaaacaaacatacacagcgacttattcacacgagctca

SEQ ID NO: 68 - DNA, 35499 bp, Artificial sequence
  plasmid pDAB9147
aattacaacggtatatatcctgccagtcagcatcatcacaccaaaagttaggcccgaatagtttgaaattagaaagctcgcaattgaggtctacaggccaaattcgctcttagccgtacaatattactcaccggatcctaaccggtttaattaaggcgcgccatgcccgggcaagcggccgcacaagtttgtacaaaaaagcaggcttctagacctaggtggagtcatcacgcagactatctcagcatgtgcgtagcacgcggccgcagcttatagtaaagatttttttgttaataaaatgaaagttaatatttatggatttatttgaacatatttacaagtttttgttaataaatttatttacagaagtgttaaatttgaaaatgtgttaaatgagagttaatatttatggatataatattactttatttaaaaataaaatgaatttatattaaaatatgatttggtaaaagatattataaagaggaacttggatgagaaagacgacgatgggcaaaagttgcatggcacaccgcttttgttcagtaacatctgcactgtggcgcctttttcacactcaccatgcatgctgccacgtcagctttcacactatgacaccactggccatacacgttgccacctcagctttctcctcttctcactatgacacgactggccatgcatgcatgcatgctgccacctcagctcccgcctcttcacccgtgtctttctctcatgtcgcagtgctgcgtgccaacctcttctctctataaatagagagaagagaatgatggttaaactcaaaccaaaacaagaaaacatacacaaatagcaaaacggatccacaaccaaaaatggcagcgaggctgcaagagcagaaaggaggtgagatggacacgaggattgcgatcataggcatgagcgccatacttccttgtggaaccacggtgagagagtcatgggagaccataagggctggcattgattgcctgtctgatcttcctgaggatcgtgttgatgtgactgcgtactttgacccagtcaagaccacaaaggacaaaatctactgcaagagaggaggtttcattcctgagtatgactttgatgcgcgtgagtttggtctcaacatgttccagatggaagattctgatgcgaatcagaccatctcacttctcaaggtcaaagaagcacttcaagatgctgggattgatgcacttggaaaggagaagaaaaacataggatgcgtgcttggcattggaggtggacagaagagttcacatgagttctacagcagactcaactatgtggttgtggagaaagtcttgagaaagatggggatgccagaggaagatgtcaaagtggctgtggagaagtacaaagcgaacttcccagaatggagacttgactctttccctggattccttgggaatgtcactgctggcagatgcaccaacacattcaacttggatggcatgaactgcgttgtggatgctgcatgtgcaagctccttgatagcagtcaaggttgcgattgatgaactgctctatggtgactgcgacatgatggtcactggtgcaacctgcacagacaactccattgggatgtacatggctttctcaaagacacctgtgttcagcacggacccaagtgtgagagcgtatgatgagaaaacgaaagggatgctcattggtgagggatcagccatgttggtgctcaaacgttatgcagatgcagtgagggatggtgatgagattcatgctgtgattcgtggttgtgcaagctcaagtgatggcaaagcagctggcatctacactcccacaatcagtggtcaagaggaagccttgagacgtgcatacaatcgtgcctgcgttgaccctgccactgtcactttggttgagggtcatgggactggcactccagttggagataggattgagttgactgcgttgaggaacttgtttgacaaagcgtatggtgaagggaacacagagaaagttgcagttggaagtatcaagtccagtattggtcatttgaaggctgttgctggtcttgctggaatgatcaaggtcatcatggctctcaaacacaagactttgcctggaacgatcaatgtggacaatccacccaatctctatgacaacactcccatcaatgagtcatccctctacatcaacacgatgaacagaccctggttccctccacctggtgttccgagacgtgctggaatatccagctttggctttggaggtgccaactaccatgcagtgttggaagaggctgaaccagagcacacgacagcgtacagactcaacaaacgtccacaaccggtgttgatgatggctgcaactcctgctgcgttgcagagcctttgtgaagctcagctgaaagagtttgaagctgcgatcaaggagaatgagacagtcaagaatactgcctacatcaagtgtgtcaagtttggagaacagttcaagttccctgggagcatacctgcgaccaatgcgagactgggattcttggtcaaagatgcggaggatgcgtgctccacgcttcgtgctatatgtgctcagtttgccaaagatgtgaccaaagaagcgtggaggcttccgagagaaggagtttctttccgtgccaaaggcattgccaccaatggtgctgttgctgcactcttctctggacaaggtgctcagtacacacacatgttcagtgaagttgcgatgaactggcctcagttcagacagtccattgctgcaatggacgctgcacagtccaaggttgctggaagtgacaaagactttgaaagagtctctcaagtcctgtacccaaggaaaccgtacgaacgtgagccagaacaagatcacaagaaaatctcactcacagcatacagccagccgtcaaccctggcatgtgctcttggtgcctttgagattttcaaggaagctggattcactccagactttgcagctggacacagcttgggtgagtttgctgcgctctatgcagctggttgtgttgacagagatgagttgtttgaacttgtttgcagaagggcaaggatcatgggaggcaaagatgcacctgccacacccaaaggttgcatggcagctgtcataggacccaacgcagagaacatcaaggttcaagctgccaacgtctggcttggaaactcaaactctccgtctcagactgtcattactgggtctgttgaagggattcaagctgaaagtgccagattgcagaaggaagggttcagagttgtgcctcttgcttgtgagtctgccttccattctccacagatggaaaatgccagctcagctttcaaagatgtcatatccaaggtttccttccgtacacccaaagcagaaacaaagctcttcagcaatgtttctggagagacctatccgacggatgccagagagatgctcactcaacacatgacctcatctgtgaagttcctgacccaagtgaggaacatgcaccaagctggtgcgagaatctttgttgagtttggaccgaaacaagttctcagcaaacttgtttctgaaaccctcaaagatgacccgtctgttgtcacagtgtctgtgaacccagcttctggcacggactctgacatacagttgagggatgctgcagttcagctggttgtggctggtgtcaatcttcaagggtttgacaagtgggatgctcctgatgccacgaggatgcaagccatcaagaaaaagagaaccacactcagactttcagctgccacctatgtcagtgacaagaccaagaaagtgagggatgctgccatgaacgacggaagatgtgtcacatacctcaagggtgctgcaccactcatcaaggctcctgaacctgtggttgacgaagctgccaagagggaggctgaaaggcttcagaaggagcttcaagacgctcagaggcagcttgacgacgccaaacgtgcagctgcagaagccaactccaaacttgctgctgccaaggaggaagccaagactgctgcagcttcagccaagcctgcagttgacactgctgttgtggagaaacatcgtgccatcctcaagtccatgctggctgagctggatggttatggaagtgttgatgcttcttcccttcagcaacagcaacagcaacagactgctccggcgcctgttaaagccgctgcccctgccgctcccgttgcaagtgctcctgctcccgccgtgtccaacgagttgcttgagaaagctgagacagttgtgatggaggttctcgctgccaagactggatacgaaacagacatgattgaggcggacatggagcttgagactgagttgggaattgacagcatcaagagggttgaaattctttctgaagtccaagctatgcttaacgttgaggcgaaagatgttgatgctctctctaggacgagaacagtgggtgaagttgtcaacgctatgaaggcagaaatcgctggttcttccgctccggcgccggcagctgccgcacctgcaccggctaaagcggctccagctgcagctgcaccagctgtttctaatgagctgctcgaaaaggcagaaactgttgtgatggaagtccttgctgccaaaactggctacgaaactgacatgatagaatcagacatggagcttgagacggagcttggaattgattccatcaagcgtgtggaaatcctcagtgaagtccaagccatgctcaatgtggaagctaaggatgtggatgctctctcaaggaccagaactgtcggtgaggttgtcaatgccatgaaggctgagatagctggaggctccgctcctgcgccggccgctgccgctcctggtcccgctgccgcggctccagctccagctgcagccgctccggccgtctcaaacgaactccttgaaaaagctgagaccgtcgtgatggaggtcttggcagctaaaaccggctatgagactgacatgattgagtctgacatggaattggagacagaacttgggatagacagcatcaaacgtgttgaaatcctcagtgaggtccaagctatgctgaacgtggaagcgaaggatgttgatgctctgtccagaacgaggaccgttggtgaggttgtggatgccatgaaggctgaaattgctggagggtctgcgcccgcgccagctgcagccgctcctgcacccgcagccgcggcacctgctccagctgcacctgcacctgccgtttcttcagaactcttggagaaggctgagacggttgtgatggaggttttggctgcaaagactggctatgagaccgacatgattgaatctgatatggaattggagacagagcttgggatcgattccatcaaaagagtggagatcctgagtgaagtccaagccatgctcaatgttgaagctaaggatgttgatgcactttcaagaacaaggacagtgggtgaggttgtggatgccatgaaggcggagattgctggagggagcgcgcctgcgccagctgccgcggcacctgcaccggcagccgcagctccagctccagctgcaccagcaccggccgcgcccgcgccagctgtttcatccgaactcctggaaaaggccgagacggttgtgatggaggtgctcgcagctaagactggttacgagaccgacatgattgaaagtgacatggagcttgaaaccgagttgggaatagatagcatcaaacgtgttgaaatcttgtctgaggtccaagctatgttgaacgtggaggcaaaagatgtcgatgcgctttcaagaaccagaacagtcggtgaggtcgtggacgccatgaaggctgaaattgccggaagctctgctagtgcgccagctgcagccgcacctgcacctgctgccgcggcacctgctccagctgcagccgctcctgccgtcagcaatgagttgctggagaaagccgaaacagttgtgatggaagtccttgctgcaaaaactggttacgaaacggacatgattgagtcagacatggaattggagaccgaacttggaatagattccatcaagagagtggagatcctctctgaggtgcaagccatgctcaacgttgaggctaaagatgttgatgcactcagtaggacaagaactgtgggggaagttgtcgatgcgatgaaggctgagattgctggaggctctgctcctgcgccggcagctgccgcacctgcacccgcagccgcggcaccagctgtcagcaacgaattgcttgagaaggctgaaacagttgtcatggaagtgctggctgcaaaaaccggctatgagactgacatgattgagtctgacatggaacttgagacggaattgggcattgacagcatcaagcgtgttgagatcctcagtgaagtccaagcaatgctcaatgtggaggctaaggatgtggatgccctctcaaggaccagaacagttggtgaggtcgttgatgcgatgaaggcggagatcgctggaagttccgcgcctgcgccagctgcagccgctcctgcacccgcagccgcggcaccggctccagctgcagccgcaccggccgtctcctcagaactcctggaaaaggctgagacagttgtgatggaagtccttgctgcgaaaactggctatgagaccgacatgattgaatctgacatggaactggagaccgagcttggaattgactccatcaaacgtgttgaaatcctctctgaggttcaagcgatgttgaatgtggaggccaaagatgttgatgctctttccagaacaaggacggtgggagaggtggttgatgccatgaaggctgagatagctgggggttctgctcctgcgccagctgcagccgctcctgctcccgctgccgcggcaccagctgtcagcaacgaactccttgaaaaagctgaaactgttgtgatggaggttttggctgcaaagactggatacgagactgacatgatagagtcagacatggagttggaaacagagcttgggattgatagcatcaagcgtgtggaaatcctttctgaggttcaagccatgctgaacgttgaggccaaagatgtcgatgctttgtcaaggaccagaacggttggagaagtggtcgatgccatgaaggctgagatagctggtggatcagcccctgctccggctgcagccgctcctgcaagtgccggtgctgcaccagctgtgaagattgattcagttcatggtgctgactgtgacgatttgtcactgatgcacgcaaaggtggttgacatcagaaggccagatgaactgattctggaaagaccggagaaccgtccagttcttgtcgttgacgatggctcagagttgacacttgctcttgtgagggtgttgggagcctgtgcagttgtcttgacctttgagggattgcagttggctcagagagctggtgcagctgccattcgtcatgttctggctaaggacctttcagcagaatcagctgagaaggccatcaaagaggctgagcaaagatttggagcgttgggaggcttcataagccagcaagcagaaaggtttgaaccagctgagatactgggtttcacactcatgtgtgcgaagtttgccaaagcctctctctgcactgctgtggctggaggtcgtcctgccttcatcggtgtggctaggcttgacggcagacttggattcacctctcaaggcacttctgacgcactcaagagagcacagcgtggagcgatctttggactctgcaagacaatagggttggagtggtcagaatctgatgtgttcagccgtggtgtggacattgctcaagggatgcacccagaagatgctgcagttgccatagttagggagatggcgtgtgctgacatcagaatcagagaggttgggattggagcaaaccagcaaagatgcacaatcagagctgccaagttggagactgggaaccctcagagacagatagcgaaagacgatgtgcttctggtttctggaggtgctcgtgggatcacacctctttgcatccgtgagatcacgcgtcagattgctggaggcaagtacattctgttgggtcgtagcaaagtttctgcgtctgaaccagcatggtgtgctggcatcactgatgagaaggctgtgcagaaagctgccacccaagagttgaagagggccttcagtgctggtgaaggacccaaacccactccaagggctgtcacgaaacttgtgggatctgttcttggtgctcgtgaagtgagaagctccattgctgccattgaagctctgggtggcaaagcgatctacagctcttgtgatgtgaactctgctgcagatgttgccaaagcagttagggatgcagagtcccagcttggtgccagagttagtggaatcgttcacgcttctggtgtgctccgtgatcgtctcatagagaagaaactccctgacgagtttgatgctgtctttgggaccaaagtcactgggttggagaatcttctggctgcagttgatcgtgccaacctcaaacacatggttctcttcagctcccttgctggtttccacggcaatgttggtcagtctgactatgcgatggcaaacgaagctctcaacaagatgggtttggaacttgcgaaggatgtcagtgtcaagtccatctgctttggtccctgggatggtgggatggtgacacctcaactcaagaaacagtttcaagaaatgggagttcagatcattcctcgtgaaggaggtgctgatacagttgcgaggattgtgttgggatcaagtcctgctgagatccttgttggaaactggaggacaccatccaagaaagttggaagtgacacgatcaccctgcatagaaagatcagtgccaagtccaatcccttcttggaggatcatgtcatacaaggcagaagggtgttgccaatgacccttgctattgggagccttgctgagacctgccttggactcttccctggctactctctctgggccatagatgacgcacagctcttcaaaggtgtcactgttgatggagacgtcaactgtgaagtgaccctcacaccgtccactgctccgagtgggagggtgaatgtccaagcgacgctcaagacgttctcaagtggaaaacttgttccagcctacagagctgtcatagtgttgtccaaccaaggtgctccacctgccaatgcaaccatgcagcctccgagccttgatgcagatcctgctttgcaagggtcagtctatgatggcaagactctctttcatggtcctgcgttcagaggcattgatgacgttctcagctgcaccaagagccagcttgttgccaagtgttctgctgttcctggatcagatgcagccagaggagagtttgcaactgacactgatgcacatgatccctttgtcaatgatcttgcctttcaagcaatgttggtctgggtgaggagaacgctgggacaagctgcactcccgaactccattcagaggatagtccaacacagaccggtcccacaagacaaacccttctacatcaccctcagatccaatcagagtggtggacatagccagcacaaacatgcacttcagttccacaacgaacaaggtgatctcttcattgatgttcaagcctctgtcattgcgacagactcacttgcgttctgagtagttagcttaatcacttaggtcacccagtccaagcccggcctagcacgatgatcatgagtgttgctattgatgtatgttaatactatacacagtcatcgtgtgtgttttataaaactgtaagcttaggatgtttgaggctaatgtaattagcactacaccgtaataaatgagaggtttactttatgttttaataatgttcttacccttgctgctctctaaactgtaatggcgtacggttagctaaactaaagtaaaaatcgattcgcttgagtaaaattagtgaccgggaaagatcatcgactactactgctcagagatgtaatcggtaattaagacttcaagctcaataattaattaggagtaaatctggcttcgaatttttaaattgtcaacttccaaagaaggattggcaagactcaatctcaattgcccaacaaacatatggctctttacaaatttggaatctctttttgatggcaagaacgtcgtaattcctctgtcgatctcatgtaattaccaaactcatctacttattactttctttatatgcacttactgatgcggccgcttaattaagatgagtgatactcaggactcaggactcactctgctgatcactagtggtcgcagcgtgtgcgtgtccgtcgtacgttctggccggccgggccttgggcgcgcgatcagaagcgttgcgttggcgtgtgtgtgcttctggtttgctttaattttaccaagtttgtttcaaggtggatcgcgtggtcaaggcccgtgtgctttaaagacccaccggcactggcagtgagtgttgctgcttgtgtaggctttggtacgtatgggctttatttgcttctggatgttgtgtactacttgggtttgttgaattattatgagcagttgcgtattgtaattcagctgggctacctggacattgttatgtattaataaatgctttgctttcttctaaagatctttaagtgctgtcgacacaactttgtatacaaaagttgtctagacctaggctcagcaactcatccagtcaagttcgagtcagtgagttgggcggccgcagcttatagtaaagatttttttgttaataaaatgaaagttaatatttatggatttatttgaacatatttacaagtttttgttaataaatttatttacagaagtgttaaatttgaaaatgtgttaaatgagagttaatatttatggatataatattactttatttaaaaataaaatgaatttatattaaaatatgatttggtaaaagatattataaagaggaacttggatgagaaagacgacgatgggcaaaagttgcatggcacaccgcttttgttcagtaacatctgcactgtggcgcctttttcacactcaccatgcatgctgccacgtcagctttcacactatgacaccactggccatacacgttgccacctcagctttctcctcttctcactatgacacgactggccatgcatgcatgcatgctgccacctcagctcccgcctcttcacccgtgtctttctctcatgtcgcagtgctgcgtgccaacctcttctctctataaatagagagaagagaatgatggttaaactcaaaccaaaacaagaaaacatacacaaatagcaaaacggatccacaaccaaaaatggctgcaaggaacgtgagtgcggctcatgagatgcatgacgagaagaggatagctgttgtgggcatggctgttcagtatgctggatgcaaaacgaaagacgagttctgggaagttctcatgaatggaaaagttgagagcaaagtgatcagcgacaaacgtcttggttcaaattaccgtgctgaacactacaaagctgaaaggagcaagtatgctgacaccttctgcaatgagacatatggaactcttgatgagaacgaaatagacaatgagcatgaactccttttgaaccttgccaaacaagccttggctgaaacatctgtcaaagattcaacaagatgtggcatagtttctggatgcctcagcttcccgatggacaacctccaaggtgaactcttgaatgtgtaccagaaccatgttgagaagaaacttggtgccagagttttcaaagatgcctctcactggtcagaaagagaacagtccaacaaaccagaggctggtgacagaagaatcttcatggaccctgcttcctttgttgctgaggaactcaatcttggcgctctccactactctgttgatgctgcctgtgccactgcgctctatgtgctcagactggcgcaagatcacttggtctctggtgcagctgatgtgatgctttgtggtgcaacatgcctgccggagccgtttttcatactctctgggttctcaaccttccaagccatgcctgttggaacgggtcagaatgtgtccatgccgctgcacaaagattctcaaggattgacccctggtgaaggaggttccatcatggtcctcaaacgtttggatgacgcaatcagagatggagatcacatctatggaacacttttgggagccaatgtcagcaacagtggcactggtctgccacttaaaccccttttgccgtcagagaaaaagtgcctcatggacacctacacacgtatcaatgtgcatccccacaagattcagtatgttgaatgccatgcaactgggactccacaaggtgatcgtgtggaaattgatgctgtgaaggcttgctttgaaggcaaagtcccacgttttggaaccacaaaagggaactttggacacacattggtggcagctgggtttgctggcatgtgcaaagtgcttctctccatgaagcacgggatcattccacccactccgggaatagatgacgaaacgaagatggaccctctggttgtctctggtgaggccattccctggccagaaacgaatggagaaccgaagcgtgctggtctctcagcgtttggatttggtgggaccaatgctcatgctgtctttgaggaacatgacccaagcaatgctgcatgcactggccatgactccatttctgctctctctgcacgttgtggtggtgagtcaaacatgagaatagcaatcactgggatggatgccacttttggtgctttgaaaggattggatgcttttgaaagggccatctacactggtgctcatggtgctataccactcccagaaaagagatggagattcctggggaaagacaaggacttccttgatctttgtggagtcaaagcaacaccgcatggctgttacattgaagatgttgaagttgatttccagaggctgaggactccaatgactcctgaagatatgctcttgcctcaacagcttctggctgtcaccacaattgatagggccatattggactctggcatgaagaaaggtggaaatgtggctgtctttgtggggttggggaccgatcttgaactctaccgtcaccgtgcaagggttgctctcaaggagagagtgaggcctgaagccagcaagaaactcaatgacatgatgcagtacatcaatgattgtgggacaagcacttcttacaccagctacataggcaacttggttgcaacaagggtcagttcacaatggggcttcacgggaccttccttcacaatcacagaaggcaacaattctgtgtacagatgtgctgaacttggcaaatacctcttggaaacgggagaggttgatggggttgtggttgcgggtgttgatctctgtgggagtgctgagaacctttacgtcaagtcaaggcgtttcaaggtgtctacatctgacaccccgagagccagctttgatgcagctgctgatggttactttgttggagagggctgtggtgcatttgtgctcaagcgtgagacaagctgcaccaaggatgacagaatctatgcttgcatggatgccatagttcctggaaatgttccatctgcatgtttgagagaggcattggatcaagccagagtcaagcctggagacatcgagatgttggagctttctgctgattcagcgaggcatttgaaggacccgtctgttctcccaaaggaactcactgctgaggaagagattggcggacttcagacgattcttcgtgacgatgacaagctcccaaggaatgttgcaactggaagtgtcaaggccactgttggtgacactggttatgcttctggtgctgccagtttgattaaggctgcgctttgcatctacaaccgttacctgcccagcaatggagatgactgggatgaacctgcacctgaagcaccctgggacagcacactctttgcgtgccagacctcaagagcttggttgaagaaccctggtgagagacgttatgcggctgtttccggagtcagtgaaaccagaagttgctacagtgtgctgctttctgaagcagagggacactacgagagagagaacagaatcagtttggatgaggaagcacccaagctcattgtgttgagagcagactcccatgaagagattcttggaagattggacaagataagggaaaggttcttgcagcccacgggtgctgcacccagagagtctgaattgaaggcgcaagcccgtaggatctttcttgaactccttggtgagacccttgcccaagatgcagcttcatctggaagtcagaagccccttgctctcagcttggtctccactccatccaagctccagagagaggtggaacttgcggcaaaaggcattccgagatgtctcaagatgagacgtgattggagttcccctgctggaagcagatatgcgcctgagcctttggccagtgacagagttgccttcatgtatggagaaggaaggagcccttactatggcatcacacaagacattcataggatttggcctgaacttcatgaggtcatcaatgagaaaacaaaccgtctctgggctgaaggtgacagatgggtcatgccaagggccagcttcaagagtgagcttgagtcacaacagcaagagtttgacagaaacatgattgaaatgttccgtcttggaatcctcacctcaattgccttcacaaacctggcgagagatgttctcaacatcacgcccaaagcagcctttggactcagtttgggagagatttccatgatctttgctttctccaagaaaaacggtttgataagcgatcagttgacaaaggatttgagagagtcagatgtctggaacaaagctctggctgttgagttcaatgcgctcagagaagcctggggcattccacagtctgtcccaaaagatgagttctggcaaggttacatagtgaggggaacgaaacaagacatagaagcagccatagcaccagactcaaagtatgtgaggttgaccatcatcaatgatgccaacactgctctcatcagtggaaagcctgatgcatgcaaagctgcgattgctcgtcttggtggcaacatccctgcgcttccagtcactcaaggcatgtgtgggcattgcccagaggtgggaccttacaccaaggacatcgcaaagatccacgccaaccttgagttccctgtggttgatggtcttgatctctggactaccataaaccagaagaggcttgtgccaagagccacgggtgccaaagatgaatgggctccttcatcctttggggagtatgctggacagctctatgagaaacaagccaacttccctcagatagttgaaaccatctacaagcagaactatgatgtgtttgttgaagttgggccaaacaatcacagaagcacagcagtgagaaccacgcttggaccacagagaaaccaccttgctggtgccatagacaagcagaacgaggatgcttggacgacaatagtcaagctcgtggcttcattgaaggctcaccttgttcctggagtgaccatcagtccgctctaccactccaagctcgttgcagaggctgaggcttgttatgctgcgctctgtaaaggtgagaaacccaagaaaaacaagtttgtgagaaagattcagttgaatggcagattcaacagcaaggcagaccccatctcctcagcagaccttgcatccttcccacctgcggaccctgcgattgaagctgccatctcttcaaggatcatgaagcctgtggctccgaaattctatgcgcgtctcaacattgatgagcaagatgagaccagagatccgatcttgaacaaggacaatgcgccttccagctccagctcttccagcagttcctcttccagcagttcatctccgtctcctgctccttcagctccagttcagaagaaagctgccccagctgcggagacaaaagctgttgccagtgctgatgcacttcgtagtgccctgcttgatcttgactccatgcttgcgctcagctctgcaagtgcttctggcaaccttgttgagactgcgccatctgatgccagtgtcattgtccctccgtgcaacattgctgatcttggcagcagagctttcatgaaaacttatggtgtttctgcgcctctgtacaccggtgcaatggccaagggaattgcctctgcggacttggtgatcgcagctggaaggcaaggaatccttgcgtcatttggtgctggaggccttccaatgcaagttgtgcgtgagtccattgaaaagattcaagctgccctgcccaatggaccatatgctgtcaacctcatccattctccttttgacagcaaccttgagaagggaaatgttgatctcttcttggaaaagggtgtcacttttgttgaggcttcagccttcatgacgttgacaccgcaagttgtcagatacagagcggctgggttgacgaggaatgcagatgggtcagtcaacataaggaacagaatcattgggaaagtctccagaactgagctggctgaaatgttcatgcgtcctgcacctgagcatcttttgcagaagctcattgcttctggggagatcaatcaagaacaagctgagttggccagacgtgttcctgtggctgatgacattgcggttgaagctgattctggtggacacactgacaaccgtccaatccatgtcattctgcctctgattatcaacctgagggataggcttcacagagagtgtggatacccagcaaacctgagggttcgtgttggtgctgggggtggcattgggtgtccccaagctgcgctggcaactttcaacatgggtgcctctttcattgtcactggaacagtgaaccaagttgccaaacaatctgggacgtgtgacaatgtgaggaaacagcttgcgaaagcaacttactcagatgtttgcatggcaccggcagctgacatgtttgaggaaggtgtgaaacttcaagttttgaagaaaggaacaatgttcccttcaagagccaacaaactctatgagttgttctgcaagtatgattcttttgagtccatgcctccagcagagcttgcgagggttgagaaaagaatcttcagtcgtgcattggaagaggtctgggatgagaccaagaacttctacatcaaccgtctccacaacccagagaagatacagagggctgagagggaccccaaactgaagatgtcactgtgtttcagatggtatctgtccctggcttcaaggtgggccaacactggagcttctgacagagtcatggactaccaagtttggtgtggtcctgccattggttcattcaatgatttcatcaaaggaacttaccttgatccggcagtggcaaatgagtacccgtgtgttgtgcagatcaacaaacagattcttagaggagcgtgcttcttgaggcgtcttgaaatactgagaaatgcaaggctttcagatggtgcagctgcacttgtggcgagcattgatgacacatatgtccctgctgagaagctgtgagtagttagcttaatcacttaggtcacccagtccaagcccggcctagcacgatgatcatgagtgttgctattgatgtatgttaatactatacacagtcatcgtgtgtgttttataaaactgtaagcttaggatgtttgaggctaatgtaattagcactacaccgtaataaatgagaggtttactttatgttttaataatgttcttacccttgctgctctctaaactgtaatggcgtacggttagctaaactaaagtaaaaatcgattcgcttgagtaaaattagtgaccgggaaagatcatcgactactactgctcagagatgtaatcggtaattaagacttcaagctcaataattaattaggagtaaatctggcttcgaatttttaaattgtcaacttccaaagaaggattggcaagactcaatctcaattgcccaacaaacatatggctctttacaaatttggaatctctttttgatggcaagaacgtcgtaattcctctgtcgatctcatgtaattaccaaactcatctacttattactttctttatatgcacttactgatgcggccgcttaattaatctgacctgaccactagacctgagtgagtacagatgtgctactagtgctagcctcgaggtcgaccaacttttctatacaaagttgtctagacctaggactaggcactgagtgactcactgacctgactgagtgactggcggccgcagcttatagtaaagatttttttgttaataaaatgaaagttaatatttatggatttatttgaacatatttacaagtttttgttaataaatttatttacagaagtgttaaatttgaaaatgtgttaaatgagagttaatatttatggatataatattactttatttaaaaataaaatgaatttatattaaaatatgatttggtaaaagatattataaagaggaacttggatgagaaagacgacgatgggcaaaagttgcatggcacaccgcttttgttcagtaacatctgcactgtggcgcctttttcacactcaccatgcatgctgccacgtcagctttcacactatgacaccactggccatacacgttgccacctcagctttctcctcttctcactatgacacgactggccatgcatgcatgcatgctgccacctcagctcccgcctcttcacccgtgtctttctctcatgtcgcagtgctgcgtgccaacctcttctctctataaatagagagaagagaatgatggttaaactcaaaccaaaacaagaaaacatacacaaatagcaaaacggatccacaaccaaaaatggcgcttcgtgtcaagaccaacaagaagccatgttgggagatgaccaaggaggaactgacctctggcaaaactgaggtgttcaactatgaggaactcctggagtttgcagagggtgacatagctaaggtttttggtccggagtttgctgtcatagacaagtaccccagaagggtgaggctgcctgctcgtgaatacctgcttgtgacaagggtcacactcatggatgccgaggtcaacaactacagagttggtgccagaatggtcactgagtatgatcttccagtgaatggcgaattgtctgagggaggtgattgtccctgggcagttctggttgagagtggacagtgcgatttgatgctgatatcatacatgggaattgatttccagaaccaaggtgacagagtttaccgtctgctcaacaccacgttgacattctatggggttgcccatgagggagagacccttgagtatgacatcagagtgaccggttttgccaaacgtttggatggtggcatctccatgttcttctttgagtatgactgctatgtcaatgggaggcttctcattgagatgagagatggctgtgctggcttcttcacaaatgaggagcttgatgcgggaaagggtgtggtgttcacaagaggggatttggctgccagagctaagattccaaagcaagatgtttctccctatgctgtcgctccctgccttcacaaaacaaaactcaacgaaaaggagatgcagaccttggttgacaaagattgggcttccgtttttggctcaaagaatggcatgccggagatcaactacaaactctgcgcacgtaagatgctcatgattgatagagtcaccagcattgaccataagggaggtgtgtacggtttgggtcagttggttggtgagaaaatcttggagagggaccattggtacttcccatgccattttgttaaggatcaagtcatggctggatctcttgtcagcgacggttgttcacaaatgctcaagatgtacatgatctggctcggtttgcaccttaccaccggaccatttgacttcagacccgtcaacggacacccgaacaaagttaggtgtaggggtcagatatctcctcataagggaaagttggtctacgtcatggagatcaaagagatgggattcgacgaggataacgatccgtacgccattgctgacgtcaacatcattgacgttgatttcgaaaagggtcaagatttcagccttgatagaatcagcgactacggaaagggggatcttaacaaaaagatcgtcgtggacttcaagggcattgctctcaagatgcagaagagatccacgaacaagaacccctccaaagttcagcccgtttttgctaacggtgcagccactgtgggaccggaagcgtccaaggccagctctggtgccagtgctagtgcttctgctgcccctgcgaagcctgctttctcagcagatgttcttgcgccaaagccagttgcacttcctgaacatatcctcaagggtgacgctctcgctccgaaagaaatgtcctggcatcccatgtcaaaacttcctggcaacccgacgccgttcttctcccctagttcttaccctccgagggcaatttgcttcatccctttccctggcaacccacttgacaacaattgcaaagctggagaaatgcctctgaactggtacaacatgtcagagttcatgtgtggaaaagttagcaactgcttgggaccagagttcgcaagatttgataagtcaaatacgagcagaagccctgcttttgatttggctcttgtgactagagttgttgaagtcacaaacatggaacatggcaagttcctgaatgttgattgcaatcccagcaaaggcacaatggtgggggagtttgactgtcctcaagatgcgtggttctttgatggttcttgcaatgatgggcacatgccttattccatcatcatggaaatcggacttcagacatccggtgttctcaccagtgtgttgaaagcaccactgacgatggacaaagatgacattctctttaggaaccttgatgcaagtgctgaaatggtgaggccagatgtggatgtgagggggaaaaccataaggaatgtgaccaagtgcactggatatgcaatgttgggaaagatggggattcacagattcacgtttgagttgtctgttgatggcgtggttttctacaaaggaagcacttcctttggatggttcactccagaggtgtttgctcagcaagctggacttgacaatgggaaaaagacggagccttggtgcaaaactaacaacacgagtgtgagaagagttgaaatcgcatcagccaaaggcaaagaacagctgactgagaaacttccagatgcaactaatgctcaagttctcagaaggtcagaacagtgtgagtatttggattacctcaacattgctcctgattctgggctgcatgggaaaggatatgcgcatggacacaaagatgttaacccacaagactggttcttctcttgtcacttttggtttgatcctgtgatgcctggatctttgggaattgagtcaatgttccagctcattgaggcatttgcggtggaccagaacataccgggagaatacaatgtgagcaatccgacctttgcccatgcccctggaaaaacggcgtggaagtaccgtggtcaattgacaccaaagaaccgtgcgatggactgtgaggtgcacatagtttcaatcacagcctctcctgaaaatggaggctacgttgacatagtggcagatggagcactttgggttgatggtctccgtgtgtatgaagccaaagaactcagagttcgtgttgtcagtgcaaaacctcaagccattccggatgttcaacaacagccacccagcgcaaaagcggaccctgggaaaactggagttgcactcagtccgactcagttgagagatgtcctgcttgaagtggacaatccattgtatcttggtgttgaaaactccaatttggtgcagtttgaatccaaacctgcaacttcttcaaggattgtcagtatcaaaccatgctccataagtgatcttggtgacaagtccttcatggaaacgtacaatgtgtcagcacctctgtacactggagcaatggccaagggaattgcgtctgcggaccttgtcattgctgctgggaagaggaagatattgggttcttttggagcgggtgggcttccaatgcaccatgtgagggcagctttggagaagatacaagcggctctgcctcaaggaccatatgctgtgaacctcattcattcaccttttgacagcaacttggaaaaggggaatgttgatctcttcctcgaaaagggcgttactgtggtggaggcttctgcattcatgaccctcactccccaagttgttcgttaccgtgcagccggactctcaaggaacgctgatgggagtgtcaacatcagaaaccgtatcattggaaaagtgtccagaacagaactcgccgaaatgttcatcagaccggctccggaacacctccttgagaaactcatagcttctggtgagataacacaagaacaagccgaacttgcccgtcgtgttcctgtcgcagacgacatcgctgttgaagctgattctggtggtcacactgacaaccgtcccatccacgtcatcttgcctttgatcatcaaccttaggaacagactgcacagagagtgtggttatcctgcgcaccttagagtcagagttggagctggaggcggtgttggctgcccacaagctgctgcggctgccctcacaatgggagctgccttcatagtgactgggactgtcaatcaagttgctaaacagtccgggacatgtgacaacgtgagaaaacaactcagtcaagccacctacagtgacatttgcatggctccagcagctgatatgtttgaggaaggtgtgaaactccaagttctcaagaagggaacaatgttcccatcaagagctaacaaattgtacgaactcttttgcaagtacgactctttcgattcaatgcctcctgctgaacttgaaaggatcgagaagaggatcttcaagagggcacttcaagaggtctgggaagagaccaaggacttttacatcaatggtttgaagaatccagagaagatacagagagcggaacatgaccccaaactcaagatgtctttgtgtttcagatggtatcttggtcttgcatcacgttgggccaacatgggtgctcctgatcgtgtcatggactatcaagtctggtgtggtccagccattggagccttcaatgacttcatcaaaggaacatatcttgatcctgctgtctctaatgagtacccatgtgttgtccagatcaaccttcagattttgcgtggtgcatgttacctgaggcgtcttaatgctctgagaaatgatccgaggattgatcttgagactgaagatgctgcctttgtctatgagccaacgaatgcgctttgagtagttagcttaatcacttaggtcacccagtccaagcccggcctagcacgatgatcatgagtgttgctattgatgtatgttaatactatacacagtcatcgtgtgtgttttataaaactgtaagcttaggatgtttgaggctaatgtaattagcactacaccgtaataaatgagaggtttactttatgttttaataatgttcttacccttgctgctctctaaactgtaatggcgtacggttagctaaactaaagtaaaaatcgattcgcttgagtaaaattagtgaccgggaaagatcatcgactactactgctcagagatgtaatcggtaattaagacttcaagctcaataattaattaggagtaaatctggcttcgaatttttaaattgtcaacttccaaagaaggattggcaagactcaatctcaattgcccaacaaacatatggctctttacaaatttggaatctctttttgatggcaagaacgtcgtaattcctctgtcgatctcatgtaattaccaaactcatctacttattactttctttatatgcacttactgatgcggccgcttaattaatcacgagtggatgactgtcacgactgactcatgactgactactagtgctagcctcgaggtcgacacaactttgtataataaagttgtctagacctaggagctgtgctgggtaactcacatgagtcactggtcacatcagcggccgcagcttatagtaaagatttttttgttaataaaatgaaagttaatatttatggatttatttgaacatatttacaagtttttgttaataaatttatttacagaagtgttaaatttgaaaatgtgttaaatgagagttaatatttatggatataatattactttatttaaaaataaaatgaatttatattaaaatatgatttggtaaaagatattataaagaggaacttggatgagaaagacgacgatgggcaaaagttgcatggcacaccgcttttgttcagtaacatctgcactgtggcgcctttttcacactcaccatgcatgctgccacgtcagctttcacactatgacaccactggccatacacgttgccacctcagctttctcctcttctcactatgacacgactggccatgcatgcatgcatgctgccacctcagctcccgcctcttcacccgtgtctttctctcatgtcgcagtgctgcgtgccaacctcttctctctataaatagagagaagagaatgatggttaaactcaaaccaaaacaagaaaacatacacaaatagcaaaacggatccacaaccaaaaatgcttcagcacacttggcttccgaagcctcccaatctgaccctcttgtcagatgaggttcatctctggaggattcctcttgaccagcctgagtcacaacttcaagaccttgctgccaccctgagcagtgatgaattggcgagggcaaacagattctactttccagaacacagaaggcgtttcactgctgggagaggcatcctcagatccatcttgggtggatacttgggagtggaaccgggtcaagtcaagtttgattatgagtcccgtgggaaaccgatccttggtgacagatttgctgagagtggactcctgttcaacttgtctcacagccagaaccttgccttgtgtgctgtcaactacacgcgtcaaataggcattgatcttgaatatctgcgtccaacatctgacttggagtctcttgcaaagaggttctttctcccaagagaatatgaactcttgaggtcactccctgatgagcagaaacagaagattttctttcgttactggacttgcaaagaggcttatctcaaagcaacgggagatggaatagccaaacttgaagagatcgagatagcactcaccccaacagaacctgccaagctccaaacagctcctgcgtggtctctgttggagcttgtgccagatgacaattgtgttgcagctgtggctgttgcgggttttggttggcagcccaagttctggcattactgagtagttagcttaatcacttaggtcacccagtccaagcccggcctagcacgatgatcatgagtgttgctattgatgtatgttaatactatacacagtcatcgtgtgtgttttataaaactgtaagcttaggatgtttgaggctaatgtaattagcactacaccgtaataaatgagaggtttactttatgttttaataatgttcttacccttgctgctctctaaactgtaatggcgtacggttagctaaactaaagtaaaaatcgattcgcttgagtaaaattagtgaccgggaaagatcatcgactactactgctcagagatgtaatcggtaattaagacttcaagctcaataattaattaggagtaaatctggcttcgaatttttaaattgtcaacttccaaagaaggattggcaagactcaatctcaattgcccaacaaacatatggctctttacaaatttggaatctctttttgatggcaagaacgtcgtaattcctctgtcgatctcatgtaattaccaaactcatctacttattactttctttatatgcacttactgatgcggccgcttaattaactactgtcactgaggccgtagacgagtacggactgatctaactagtgctagcctcgaggtcgacacccagctttcttgtacaaagtggttgcggccgcttaattaaatttaaattcaattaatgcaatcttgattttcaacaacgaaggtaatggcgtaaaagaaaaaatgtatgttattgtattgatctttcatgatgttgaagcgtgccataatatgatgatgtataattaaaatattaactgtcgcattttattgaaatggcactgttatttcaaccatatctttgattctgttacatgacacgactgcaagaagtaaataatagacgccgttgttaaagaattgctatcatatgtgcctaactagagggaatttgagcgtcagacctaatcaaatattacaaaatatctcactctgtcgccagcaatggtgtaatcagcgcagacaaatggcgtaaagatcgcggaaaaacctccccgagtggcatgatagctgcctctgtattgctgatttagtcagccttatttgacttaagggtgccctcgttagtgacaaattgctttcaaggagacagccatgccccacactttgttgaaaaacaaattgcctttggggagacggtaaagccagttgctcttcaataaggaatgtcgaggaggcaatgtaaccgcctctggtagtacacttctctaatccaaaaatcaatttgtattcaagataccgcaaaaaacttatggtttaaaccctgcaggactagtccagaaggtaattatccaagatgtagcatcaagaatccaatgtttacgggaaaaactatggaagtattatgtaagctcagcaagaagcagatcaatatgcggcacatatgcaacctatgttcaaaaatgaagaatgtacagatacaagatcctatactgccagaatacgaagaagaatacgtagaaattgaaaaagaagaaccaggcgaagaaaagaatcttgaagacgtaagcactgacgacaacaatgaaaagaagaagataaggtcggtgattgtgaaagagacatagaggacacatgtaaggtggaaaatgtaagggcggaaagtaaccttatcacaaaggaatcttatcccccactacttatccttttatatttttccgtgtcatttttgcccttgagttttcctatataaggaaccaagttcggcatttgtgaaaacaagaaaaaatttggtgtaagctattttctttgaagtactgaggatacaacttcagagaaatttgtaagtttgtaggtaccagatctggatcccaaaccatgtctccggagaggagaccagttgagattaggccagctacagcagctgatatggccgcggtttgtgatatcgttaaccattacattgagacgtctacagtgaactttaggacagagccacaaacaccacaagagtggattgatgatctagagaggttgcaagatagatacccttggttggttgctgaggttgagggtgttgtggctggtattgcttacgctgggccctggaaggctaggaacgcttacgattggacagttgagagtactgtttacgtgtcacataggcatcaaaggttgggcctaggatctacattgtacacacatttgcttaagtctatggaggcgcaaggttttaagtctgtggttgctgttataggccttccaaacgatccatctgttaggttgcatgaggctttgggatacacagcccggggtacattgcgcgcagctggatacaagcatggtggatggcatgatgttggtttttggcaaagggattttgagttgccagctcctccaaggccagttaggccagttacccaaatctgagtagttagcttaatcacctagagctcgatcggcggcaatagcttcttagcgccatcccgggttgatcctatctgtgttgaaatagttgcggtgggcaaggctctctttcagaaagacaggcggccaaaggaacccaaggtgaggtgggctatggctctcagttccttgtggaagcgcttggtctaaggtgcagaggtgttagcgggatgaagcaaaagtgtccgattgtaacaagatatgttgatcctacgtaaggatattaaagtatgtattcatcactaatataatcagtgtattccaatatgtactacgatttccaatgtctttattgtcgccgtatgtaatcggcgtcacaaaataatccccggtgactttcttttaatccaggatgaaataatatgttattataatttttgcgatttggtccgttataggaattgaagtgtgcttgaggtcggtcgccaccactcccatttcataattttacatgtatttgaaaaataaaaatttatggtattcaatttaaacacgtatacttgtaaagaatgatatcttgaaagaaatatagtttaaatatttattgataaaataacaagtcaggtattatagtccaagcaaaaacataaatttattgatgcaagtttaaattcagaaatatttcaataactgattatatcagctggtacattgccgtagatgaaagactgagtgcgatattatggtgtaatacataggaattcgtttaaacgatctgcgtctaattttcggtccaacttgcacaggaaagacgtcgaccgcggtagctcttgcccagcagactgggcttccagtcctttcgctcgatcgggtccaatgttgtcctcagctgtgaaccggaagcggacgaccaacagtggaagaactgaaaggaacgagccgtctataccttgatgatcggcctctggtgaagggtatcatcgcagccaagcaagctcatgaaaggctgatgggggaggtgtataattatgaggcccacggcgggcttattctttagggaggatctatctcgttgctcaagtgcatggcgcaaagcagttattggagtgcggattttcgttggcatattattcgccacgagttagcagacgaagagaccttcatgaacgtggccaaggccagagttaagcagatgttacgccctgctgcaggcctttctattatccaatagttggttgatctttggaaagagcctcggctgaggcccatactgaaagagatcgatggatatcgatatgccatgttgtttgctagccagaaccagatcacatccgatatgctattgcagcttgacgcagatatggaggataagttgattcatgggatcgctcaggagtagctcatccatgcacgccgacaagaacagaaattccgtcgagttaacgcagccgcttacgacggattcgaaggtcatccattcggaatgtattagtttgcaccagctccgcgtcacacctgtcttcatttgaataagatgttagcaattgtttttagctttgtcttgttgtggcagggcggcaagtgcttcagacatcattctgttttcaaattttatgctggagaacagcttcttaattcctttggaaataatagactgcgtcttaaaattcagatgtctggatatagatatgattgtaaaataacctatttaagtgtcatttagaacataagttttatgaatgttcttccattttcgtcatcgaacgaataagagtaaatacaccttttttaacattacaaataagttcttatacgttgtttatacaccgggaatcatttccattattttcgcgcaaaagtcacggatattcgtgaaagcgacataaactgcgaaatttgcggggagtgtcttgagtttgcctcgaggctagcgcatgcacatagacacacacatcatctcattgatgcttggtaataattgtcattagattgtttttatgcatagatgcactcgaaatcagccaattttagacaagtatcaaacggatgtgacttcagtacattaaaaacgtccgcaatgtgttattaagttgtctaagcgtcaatttgatttacaattgaatatatcctgccccagccagccaacagctcgatttacaattgaatatatcctgccggccggcccacgcgtgtcgaggaattctgatctggcccccatttggacgtgaatgtagacacgtcgaaataaagatttccgaattagaataatttgtttattgctttcgcctataaatacgacggatcgtaatttgtcgttttatcaaaatgtactttcattttataataacgctgcggacatctacatttttgaattgaaaaaaaattggtaattactctttctttttctccatattgaccatcatactcattgctgatccatgtagatttcccggacatgaagccatttacaattgaatatatcctgccgccgctgccgctttgcacccggtggagcttgcatgttggtttctacgcagaactgagccggttaggcagataatttccattgagaactgagccatgtgcaccttccccccaacacggtgagcgacggggcaacggagtgatccacatgggacttttaaacatcatccgtcggatggcgttgcgagagaagcagtcgatccgtgagatcagccgacgcaccgggcaggcgcgcaacacgatcgcaaagtatttgaacgcaggtacaatcgagccgacgttcacgcggaacgaccaagcaagcttggctgccatttttggggtgaggccgttcgcggccgaggggcgcagcccctggggggatgggaggcccgcgttagcgggccgggagggttcgagaagggggggcaccccccttcggcgtgcgcggtcacgcgcacagggcgcagccctggttaaaaacaaggtttataaatattggtttaaaagcaggttaaaagacaggttagcggtggccgaaaaacgggcggaaacccttgcaaatgctggattttctgcctgtggacagcccctcaaatgtcaataggtgcgcccctcatctgtcagcactctgcccctcaagtgtcaaggatcgcgcccctcatctgtcagtagtcgcgcccctcaagtgtcaataccgcagggcacttatccccaggcttgtccacatcatctgtgggaaactcgcgtaaaatcaggcgttttcgccgatttgcgaggctggccagctccacgtcgccggccgaaatcgagcctgcccctcatctgtcaacgccgcgccgggtgagtcggcccctcaagtgtcaacgtccgcccctcatctgtcagtgagggccaagttttccgcgaggtatccacaacgccggcggccgcggtgtctcgcacacggcttcgacggcgtttctggcgcgtttgcagggccatagacggccgccagcccagcggcgagggcaaccagcccggtgagcgtcggaaagggtcgacggatcttttccgctgcataaccctgcttcggggtcattatagcgattttttcggtatatccatcctttttcgcacgatatacaggattttgccaaagggttcgtgtagactttccttggtgtatccaacggcgtcagccgggcaggataggtgaagtaggcccacccgcgagcgggtgttccttcttcactgtcccttattcgcacctggcggtgctcaacgggaatcctgctctgcgaggctggccggctaccgccggcgtaacagatgagggcaagcggatggctgatgaaaccaagccaaccaggaagggcagcccacctatcaaggtgtactgccttccagacgaacgaagagcgattgaggaaaaggcggcggcggccggcatgagcctgtcggcctacctgctggccgtcggccagggctacaaaatcacgggcgtcgtggactatgagcacgtccgcgagctggcccgcatcaatggcgacctgggccgcctgggcggcctgctgaaactctggctcaccgacgacccgcgcacggcgcggttcggtgatgccacgatcctcgccctgctggcgaagatcgaagagaagcaggacgagcttggcaaggtcatgatgggcgtggtccgcccgagggcagagccatgacttttttagccgctaaaacggccggggggtgcgcgtgattgccaagcacgtccccatgcgctccatcaagaagagcgacttcgcggagctggtattcgtgcagggcaagattcggaataccaagtacgagaaggacggccagacggtctacgggaccgacttcattgccgataaggtggattatctggacaccaaggcaccaggcgggtcaaatcaggaataagggcacattgccccggcgtgagtcggggcaatcccgcaaggagggtgaatgaatcggacgtttgaccggaaggcatacaggcaagaactgatcgacgcggggttttccgccgaggatgccgaaaccatcgcaagccgcaccgtcatgcgtgcgccccgcgaaaccttccagtccgtcggctcgatggtccagcaagctacggccaagatcgagcgcgacagcgtgcaactggctccccctgccctgcccgcgccatcggccgccgtggagcgttcgcgtcgtctcgaacaggaggcggcaggtttggcgaagtcgatgaccatcgacacgcgaggaactatgacgaccaagaagcgaaaaaccgccggcgaggacctggcaaaacaggtcagcgaggccaagcaggccgcgttgctgaaacacacgaagcagcagatcaaggaaatgcagctttccttgttcgatattgcgccgtggccggacacgatgcgagcgatgccaaacgacacggcccgctctgccctgttcaccacgcgcaacaagaaaatcccgcgcgaggcgctgcaaaacaaggtcattttccacgtcaacaaggacgtgaagatcacctacaccggcgtcgagctgcgggccgacgatgacgaactggtgtggcagcaggtgttggagtacgcgaagcgcacccctatcggcgagccgatcaccttcacgttctacgagctttgccaggacctgggctggtcgatcaatggccggtattacacgaaggccgaggaatgcctgtcgcgcctacaggcgacggcgatgggcttcacgtccgaccgcgttgggcacctggaatcggtgtcgctgctgcaccgcttccgcgtcctggaccgtggcaagaaaacgtcccgttgccaggtcctgatcgacgaggaaatcgtcgtgctgtttgctggcgaccactacacgaaattcatatgggagaagtaccgcaagctgtcgccgacggcccgacggatgttcgactatttcagctcgcaccgggagccgtacccgctcaagctggaaaccttccgcctcatgtgcggatcggattccacccgcgtgaagaagtggcgcgagcaggtcggcgaagcctgcgaagagttgcgaggcagcggcctggtggaacacgcctgggtcaatgatgacctggtgcattgcaaacgctagggccttgtggggtcagttccggctgggggttcagcagccagcgctttactggcatttcaggaacaagcgggcactgctcgacgcacttgcttcgctcagtatcgctcgggacgcacggcgcgctctacgaactgccgataaacagaggattaaaattgacaattgtgattaaggctcagattcgacggcttggagcggccgacgtgcaggatttccgcgagatccgattgtcggccctgaagaaagctccagagatgttcgggtccgtttacgagcacgaggagaaaaagcccatggaggcgttcgctgaacggttgcgagatgccgtggcattcggcgcctacatcgacggcgagatcattgggctgtcggtcttcaaacaggaggacggccccaaggacgctcacaaggcgcatctgtccggcgttttcgtggagcccgaacagcgaggccgaggggtcgccggtatgctgctgcgggcgttgccggcgggtttattgctcgtgatgatcgtccgacagattccaacgggaatctggtggatgcgcatcttcatcctcggcgcacttaatatttcgctattctggagcttgttgtttatttcggtctaccgcctgccgggcggggtcgcggcgacggtaggcgctgtgcagccgctgatggtcgtgttcatctctgccgctctgctaggtagcccgatacgattgatggcggtcctgggggctatttgcggaactgcgggcgtggcgctgttggtgttgacaccaaacgcagcgctagatcctgtcggcgtcgcagcgggcctggcgggggcggtttccatggcgttcggaaccgtgctgacccgcaagtggcaacctcccgtgcctctgctcacctttaccgcctggcaactggcggccggaggacttctgctcgttccagtagctttagtgtttgatccgccaatcccgatgcctacaggaaccaatgttctcggcctggcgtggctcggcctgatcggagcgggtttaacctacttcctttggttccgggggatctcgcgactcgaacctacagttgtttccttactgggctttctcagcccccgagcgcttagtgggaatttgtaccccttatcgaaccgggagcacaggatgacgcctaacaattcattcaagccgacaccgcttcgcggcgcggcttaattcaggagttaaacatcatgagggaagcggtgatcgccgaagtatcgactcaactatcagaggtagttggcgtcatcgagcgccatctcgaaccgacgttgctggccgtacatttgtacggctccgcagtggatggcggcctgaagccacacagtgatattgatttgctggttacggtgaccgtaaggcttgatgaaacaacgcggcgagctttgatcaacgaccttttggaaacttcggcttcccctggagagagcgagattctccgcgctgtagaagtcaccattgttgtgcacgacgacatcattccgtggcgttatccagctaagcgcgaactgcaatttggagaatggcagcgcaatgacattcttgcaggtatcttcgagccagccacgatcgacattgatctggctatcttgctgacaaaagcaagagaacatagcgttgccttggtaggtccagcggcggaggaactctttgatccggttcctgaacaggatctatttgaggcgctaaatgaaaccttaacgctatggaactcgccgcccgactgggctggcgatgagcgaaatgtagtgcttacgttgtcccgcatttggtacagcgcagtaaccggcaaaatcgcgccgaaggatgtcgctgccgactgggcaatggagcgcctgccggcccagtatcagcccgtcatacttgaagctaggcaggcttatcttggacaagaagatcgcttggcctcgcgcgcagatcagttggaagaatttgttcactacgtgaaaggcgagatcaccaaggtagtcggcaaataatgtctaacaattcgttcaagccgacgccgcttcgcggcgcggcttaactcaagcgttagagagctggggaagactatgcgcgatctgttgaaggtggttctaagcctcgtcttgcgatggcatttcgatccattcccattccgcgctcaagatggcttcccctcggcagttcatcagggctaaatcaatctagccgacttgtccggtgaaatgggctgcactccaacagaaacaatcaaacaaacatacacagcgacttattcacacgagctca

SEQ ID NO: 69 - DNA, 22042 bp, Artificial sequence
  plasmid pDAB108224
aattacaacggtatatatcctgccagtcagcatcatcacaccaaaagttaggcccgaatagtttgaaattagaaagctcgcaattgaggtctacaggccaaattcgctcttagccgtacaatattactcaccggatcctaaccggtttaattaaggcgcgccatgcccgggcaagcggccgcacaagtttgtacaaaaaagcaggcttctagtgatcagcagagtgagtcctgagtcctgagtatcactcatcttaattaagcggccgcatcagtaagtgcatataaagaaagtaataagtagatgagtttggtaattacatgagatcgacagaggaattacgacgttcttgccatcaaaaagagattccaaatttgtaaagagccatatgtttgttgggcaattgagattgagtcttgccaatccttctttggaagttgacaatttaaaaattcgaagccagatttactcctaattaattattgagcttgaagtcttaattaccgattacatctctgagcagtagtagtcgatgatctttcccggtcactaattttactcaagcgaatcgatttttactttagtttagctaaccgtacgccattacagtttagagagcagcaagggtaagaacattattaaaacataaagtaaacctctcatttattacggtgtagtgctaattacattagcctcaaacatcctaagcttacagttttataaaacacacacgatgactgtgtatagtattaacatacatcaatagcaacactcatgatcatcgtgctaggccgggcttggactgggtgacctaagtgattaagctaactactcagaacgcaagtgagtctgtcgcaatgacagaggcttgaacatcaatgaagagatcaccttgttcgttgtggaactgaagtgcatgtttgtgctggctatgtccaccactctgattggatctgagggtgatgtagaagggtttgtcttgtgggaccggtctgtgttggactatcctctgaatggagttcgggagtgcagcttgtcccagcgttctcctcacccagaccaacattgcttgaaaggcaagatcattgacaaagggatcatgtgcatcagtgtcagttgcaaactctcctctggctgcatctgatccaggaacagcagaacacttggcaacaagctggctcttggtgcagctgagaacgtcatcaatgcctctgaacgcaggaccatgaaagagagtcttgccatcatagactgacccttgcaaagcaggatctgcatcaaggctcggaggctgcatggttgcattggcaggtggagcaccttggttggacaacactatgacagctctgtaggctggaacaagttttccacttgagaacgtcttgagcgtcgcttggacattcaccctcccactcggagcagtggacggtgtgagggtcacttcacagttgacgtctccatcaacagtgacacctttgaagagctgtgcgtcatctatggcccagagagagtagccagggaagagtccaaggcaggtctcagcaaggctcccaatagcaagggtcattggcaacacccttctgccttgtatgacatgatcctccaagaagggattggacttggcactgatctttctatgcagggtgatcgtgtcacttccaactttcttggatggtgtcctccagtttccaacaaggatctcagcaggacttgatcccaacacaatcctcgcaactgtatcagcacctccttcacgaggaatgatctgaactcccatttcttgaaactgtttcttgagttgaggtgtcaccatcccaccatcccagggaccaaagcagatggacttgacactgacatccttcgcaagttccaaacccatcttgttgagagcttcgtttgccatcgcatagtcagactgaccaacattgccgtggaaaccagcaagggagctgaagagaaccatgtgtttgaggttggcacgatcaactgcagccagaagattctccaacccagtgactttggtcccaaagacagcatcaaactcgtcagggagtttcttctctatgagacgatcacggagcacaccagaagcgtgaacgattccactaactctggcaccaagctgggactctgcatccctaactgctttggcaacatctgcagcagagttcacatcacaagagctgtagatcgctttgccacccagagcttcaatggcagcaatggagcttctcacttcacgagcaccaagaacagatcccacaagtttcgtgacagcccttggagtgggtttgggtccttcaccagcactgaaggccctcttcaactcttgggtggcagctttctgcacagccttctcatcagtgatgccagcacaccatgctggttcagacgcagaaactttgctacgacccaacagaatgtacttgcctccagcaatctgacgcgtgatctcacggatgcaaagaggtgtgatcccacgagcacctccagaaaccagaagcacatcgtctttcgctatctgtctctgagggttcccagtctccaacttggcagctctgattgtgcatctttgctggtttgctccaatcccaacctctctgattctgatgtcagcacacgccatctccctaactatggcaactgcagcatcttctgggtgcatcccttgagcaatgtccacaccacggctgaacacatcagattctgaccactccaaccctattgtcttgcagagtccaaagatcgctccacgctgtgctctcttgagtgcgtcagaagtgccttgagaggtgaatccaagtctgccgtcaagcctagccacaccgatgaaggcaggacgacctccagccacagcagtgcagagagaggctttggcaaacttcgcacacatgagtgtgaaacccagtatctcagctggttcaaacctttctgcttgctggcttatgaagcctcccaacgctccaaatctttgctcagcctctttgatggccttctcagctgattctgctgaaaggtccttagccagaacatgacgaatggcagctgcaccagctctctgagccaactgcaatccctcaaaggtcaagacaactgcacaggctcccaacaccctcacaagagcaagtgtcaactctgagccatcgtcaacgacaagaactggacggttctccggtctttccagaatcagttcatctggccttctgatgtcaaccacctttgcgtgcatcagtgacaaatcgtcacagtcagcaccatgaactgaatcaatcttcacagctggtgcagcaccggcacttgcaggagcggctgcagccggagcaggggctgatccaccagctatctcagccttcatggcatcgaccacttctccaaccgttctggtccttgacaaagcatcgacatctttggcctcaacgttcagcatggcttgaacctcagaaaggatttccacacgcttgatgctatcaatcccaagctctgtttccaactccatgtctgactctatcatgtcagtctcgtatccagtctttgcagccaaaacctccatcacaacagtttcagctttttcaaggagttcgttgctgacagctggtgccgcggcagcgggagcaggagcggctgcagctggcgcaggagcagaacccccagctatctcagccttcatggcatcaaccacctctcccaccgtccttgttctggaaagagcatcaacatctttggcctccacattcaacatcgcttgaacctcagagaggatttcaacacgtttgatggagtcaattccaagctcggtctccagttccatgtcagattcaatcatgtcggtctcatagccagttttcgcagcaaggacttccatcacaactgtctcagccttttccaggagttctgaggagacggccggtgcggctgcagctggagccggtgccgcggctgcgggtgcaggagcggctgcagctggcgcaggcgcggaacttccagcgatctccgccttcatcgcatcaacgacctcaccaactgttctggtccttgagagggcatccacatccttagcctccacattgagcattgcttggacttcactgaggatctcaacacgcttgatgctgtcaatgcccaattccgtctcaagttccatgtcagactcaatcatgtcagtctcatagccggtttttgcagccagcacttccatgacaactgtttcagccttctcaagcaattcgttgctgacagctggtgccgcggctgcgggtgcaggtgcggcagctgccggcgcaggagcagagcctccagcaatctcagccttcatcgcatcgacaacttcccccacagttcttgtcctactgagtgcatcaacatctttagcctcaacgttgagcatggcttgcacctcagagaggatctccactctcttgatggaatctattccaagttcggtctccaattccatgtctgactcaatcatgtccgtttcgtaaccagtttttgcagcaaggacttccatcacaactgtttcggctttctccagcaactcattgctgacggcaggagcggctgcagctggagcaggtgccgcggcagcaggtgcaggtgcggctgcagctggcgcactagcagagcttccggcaatttcagccttcatggcgtccacgacctcaccgactgttctggttcttgaaagcgcatcgacatcttttgcctccacgttcaacatagcttggacctcagacaagatttcaacacgtttgatgctatctattcccaactcggtttcaagctccatgtcactttcaatcatgtcggtctcgtaaccagtcttagctgcgagcacctccatcacaaccgtctcggccttttccaggagttcggatgaaacagctggcgcgggcgcggccggtgctggtgcagctggagctggagctgcggctgccggtgcaggtgccgcggcagctggcgcaggcgcgctccctccagcaatctccgccttcatggcatccacaacctcacccactgtccttgttcttgaaagtgcatcaacatccttagcttcaacattgagcatggcttggacttcactcaggatctccactcttttgatggaatcgatcccaagctctgtctccaattccatatcagattcaatcatgtcggtctcatagccagtctttgcagccaaaacctccatcacaaccgtctcagccttctccaagagttctgaagaaacggcaggtgcaggtgcagctggagcaggtgccgcggctgcgggtgcaggagcggctgcagctggcgcgggcgcagaccctccagcaatttcagccttcatggcatccacaacctcaccaacggtcctcgttctggacagagcatcaacatccttcgcttccacgttcagcatagcttggacctcactgaggatttcaacacgtttgatgctgtctatcccaagttctgtctccaattccatgtcagactcaatcatgtcagtctcatagccggttttagctgccaagacctccatcacgacggtctcagctttttcaaggagttcgtttgagacggccggagcggctgcagctggagctggagccgcggcagcgggaccaggagcggcagcggccggcgcaggagcggagcctccagctatctcagccttcatggcattgacaacctcaccgacagttctggtccttgagagagcatccacatccttagcttccacattgagcatggcttggacttcactgaggatttccacacgcttgatggaatcaattccaagctccgtctcaagctccatgtctgattctatcatgtcagtttcgtagccagttttggcagcaaggacttccatcacaacagtttctgccttttcgagcagctcattagaaacagctggtgcagctgcagctggagccgctttagccggtgcaggtgcggcagctgccggcgccggagcggaagaaccagcgatttctgccttcatagcgttgacaacttcacccactgttctcgtcctagagagagcatcaacatctttcgcctcaacgttaagcatagcttggacttcagaaagaatttcaaccctcttgatgctgtcaattcccaactcagtctcaagctccatgtccgcctcaatcatgtctgtttcgtatccagtcttggcagcgagaacctccatcacaactgtctcagctttctcaagcaactcgttggacacggcgggagcaggagcacttgcaacgggagcggcaggggcagcggctttaacaggcgccggagcagtctgttgctgttgctgttgctgaagggaagaagcatcaacacttccataaccatccagctcagccagcatggacttgaggatggcacgatgtttctccacaacagcagtgtcaactgcaggcttggctgaagctgcagcagtcttggcttcctccttggcagcagcaagtttggagttggcttctgcagctgcacgtttggcgtcgtcaagctgcctctgagcgtcttgaagctccttctgaagcctttcagcctccctcttggcagcttcgtcaaccacaggttcaggagccttgatgagtggtgcagcacccttgaggtatgtgacacatcttccgtcgttcatggcagcatccctcactttcttggtcttgtcactgacataggtggcagctgaaagtctgagtgtggttctctttttcttgatggcttgcatcctcgtggcatcaggagcatcccacttgtcaaacccttgaagattgacaccagccacaaccagctgaactgcagcatccctcaactgtatgtcagagtccgtgccagaagctgggttcacagacactgtgacaacagacgggtcatctttgagggtttcagaaacaagtttgctgagaacttgtttcggtccaaactcaacaaagattctcgcaccagcttggtgcatgttcctcacttgggtcaggaacttcacagatgaggtcatgtgttgagtgagcatctctctggcatccgtcggataggtctctccagaaacattgctgaagagctttgtttctgctttgggtgtacggaaggaaaccttggatatgacatctttgaaagctgagctggcattttccatctgtggagaatggaaggcagactcacaagcaagaggcacaactctgaacccttccttctgcaatctggcactttcagcttgaatcccttcaacagacccagtaatgacagtctgagacggagagtttgagtttccaagccagacgttggcagcttgaaccttgatgttctctgcgttgggtcctatgacagctgccatgcaacctttgggtgtggcaggtgcatctttgcctcccatgatccttgcccttctgcaaacaagttcaaacaactcatctctgtcaacacaaccagctgcatagagcgcagcaaactcacccaagctgtgtccagctgcaaagtctggagtgaatccagcttccttgaaaatctcaaaggcaccaagagcacatgccagggttgacggctggctgtatgctgtgagtgagattttcttgtgatcttgttctggctcacgttcgtacggtttccttgggtacaggacttgagagactctttcaaagtctttgtcacttccagcaaccttggactgtgcagcgtccattgcagcaatggactgtctgaactgaggccagttcatcgcaacttcactgaacatgtgtgtgtactgagcaccttgtccagagaagagtgcagcaacagcaccattggtggcaatgcctttggcacggaaagaaactccttctctcggaagcctccacgcttctttggtcacatctttggcaaactgagcacatatagcacgaagcgtggagcacgcatcctccgcatctttgaccaagaatcccagtctcgcattggtcgcaggtatgctcccagggaacttgaactgttctccaaacttgacacacttgatgtaggcagtattcttgactgtctcattctccttgatcgcagcttcaaactctttcagctgagcttcacaaaggctctgcaacgcagcaggagttgcagccatcatcaacaccggttgtggacgtttgttgagtctgtacgctgtcgtgtgctctggttcagcctcttccaacactgcatggtagttggcacctccaaagccaaagctggatattccagcacgtctcggaacaccaggtggagggaaccagggtctgttcatcgtgttgatgtagagggatgactcattgatgggagtgttgtcatagagattgggtggattgtccacattgatcgttccaggcaaagtcttgtgtttgagagccatgatgaccttgatcattccagcaagaccagcaacagccttcaaatgaccaatactggacttgatacttccaactgcaactttctctgtgttcccttcaccatacgctttgtcaaacaagttcctcaacgcagtcaactcaatcctatctccaactggagtgccagtcccatgaccctcaaccaaagtgacagtggcagggtcaacgcaggcacgattgtatgcacgtctcaaggcttcctcttgaccactgattgtgggagtgtagatgccagctgctttgccatcacttgagcttgcacaaccacgaatcacagcatgaatctcatcaccatccctcactgcatctgcataacgtttgagcaccaacatggctgatccctcaccaatgagcatccctttcgttttctcatcatacgctctcacacttgggtccgtgctgaacacaggtgtctttgagaaagccatgtacatcccaatggagttgtctgtgcaggttgcaccagtgaccatcatgtcgcagtcaccatagagcagttcatcaatcgcaaccttgactgctatcaaggagcttgcacatgcagcatccacaacgcagttcatgccatccaagttgaatgtgttggtgcatctgccagcagtgacattcccaaggaatccagggaaagagtcaagtctccattctgggaagttcgctttgtacttctccacagccactttgacatcttcctctggcatccccatctttctcaagactttctccacaaccacatagttgagtctgctgtagaactcatgtgaactcttctgtccacctccaatgccaagcacgcatcctatgtttttcttctcctttccaagtgcatcaatcccagcatcttgaagtgcttctttgaccttgagaagtgagatggtctgattcgcatcagaatcttccatctggaacatgttgagaccaaactcacgcgcatcaaagtcatactcaggaatgaaacctcctctcttgcagtagattttgtcctttgtggtcttgactgggtcaaagtacgcagtcacatcaacacgatcctcaggaagatcagacaggcaatcaatgccagcccttatggtctcccatgactctctcaccgtggttccacaaggaagtatggcgctcatgcctatgatcgcaatcctcgtgtccatctcacctcctttctgctcttgcagcctcgctgccatttttggttgtggatccgttttgctatttgtgtatgttttcttgttttggtttgagtttaaccatcattctcttctctctatttatagagagaagaggttggcacgcagcactgcgacatgagagaaagacacgggtgaagaggcgggagctgaggtggcagcatgcatgcatgcatggccagtcgtgtcatagtgagaagaggagaaagctgaggtggcaacgtgtatggccagtggtgtcatagtgtgaaagctgacgtggcagcatgcatggtgagtgtgaaaaaggcgccacagtgcagatgttactgaacaaaagcggtgtgccatgcaacttttgcccatcgtcgtctttctcatccaagttcctctttataatatcttttaccaaatcatattttaatataaattcattttatttttaaataaagtaatattatatccataaatattaactctcatttaacacattttcaaatttaacacttctgtaaataaatttattaacaaaaacttgtaaatatgttcaaataaatccataaatattaactttcattttattaacaaaaaaatctttactataagctgcggccgcttaattaagatgagtgatactcaggactcaggactcactctgctgatcactagtgctagcctcgaggtcgacacaactttgtatacaaaagttgtctaggatctgcttttacatgcgagacacatcttctaaagtaattttaataatagttactatattcaagatttcatatatcaaatactcaatattacttctaaaaaattaattagatataattaaaatattacttttttaattttaagtttaattgttgaatttgtgactattgatttattattctactatgtttaaattgttttatagatagtttaaagtaaatataagtaatgtagtagagtgttagagtgttaccctaaaccataaactataagatttatggtggactaattttcatatatttcttattgcttttaccttttcttggtatgtaagtccgtaactggaattactgtgggttgccatgacactctgtggtcttttggttcatgcatggatcttgcgcaagaaaaagacaaagaacaaagaaaaaagacaaaacagagagacaaaacgcaatcacacaaccaactcaaattagtcactggctgatcaagatcgccgcgtccatgtatgtctaaatgccatgcaaagcaacacgtgcttaacatgcactttaaatggctcacccatctcaacccacacacaaacacattgcctttttcttcatcatcaccacaaccacctgtatatattcattctcttccgccacctcaatttcttcacttcaacacacgtcaacctgcatatgcgtgtcatcccatgcccaaatctccatgcatgttccaaccaccttctctcttatataatacctataaatacctctaatatcactcacttctttcatcatccatccatccagagtactactactctactactataataccccaacccaactcatattcaatactactctaggatccacaaccaaaaatgcttcagcacacttggcttccgaagcctcccaatctgaccctcttgtcagatgaggttcatctctggaggattcctcttgaccagcctgagtcacaacttcaagaccttgctgccaccctgagcagtgatgaattggcgagggcaaacagattctactttccagaacacagaaggcgtttcactgctgggagaggcatcctcagatccatcttgggtggatacttgggagtggaaccgggtcaagtcaagtttgattatgagtcccgtgggaaaccgatccttggtgacagatttgctgagagtggactcctgttcaacttgtctcacagccagaaccttgccttgtgtgctgtcaactacacgcgtcaaataggcattgatcttgaatatctgcgtccaacatctgacttggagtctcttgcaaagaggttctttctcccaagagaatatgaactcttgaggtcactccctgatgagcagaaacagaagattttctttcgttactggacttgcaaagaggcttatctcaaagcaacgggagatggaatagccaaacttgaagagatcgagatagcactcaccccaacagaacctgccaagctccaaacagctcctgcgtggtctctgttggagcttgtgccagatgacaattgtgttgcagctgtggctgttgcgggttttggttggcagcccaagttctggcattactgagtagttagcttaatcacttaggtcacctcgagtatcaaaatctatttagaaatacacaatattttgttgcaggcttgctggagaatcgatctgctatcataaaaattacaaaaaaattttatttgcctcaattattttaggattggtattaaggacgcttaaattatttgtcgggtcactacgcatcattgtgattgagaagatcagcgatacgaaatattcgtagtactatcgataatttatttgaaaattcataagaaaagcaaacgttacatgaattgatgaaacaatacaaagacagataaagccacgcacatttaggatattggccgagattactgaatattgagtaagatcacggaatttctgacaggagcatgtcttcaattcagcccaaatggcagttgaaatactcaaaccgccccatatgcaggagcggatcattcattgtttgtttggttgcctttgccaacatgggagtccaaggttggcgcgccgaattcgcggccgcttaattaactactgtcactgaggccgtagacgagtacggactgatctaactagtgctagcctcgaggtcgacacccagctttcttgtacaaagtggttgcggccgcttaattaaatttaaattcaattaatgcaatcttgattttcaacaacgaaggtaatggcgtaaaagaaaaaatgtatgttattgtattgatctttcatgatgttgaagcgtgccataatatgatgatgtataattaaaatattaactgtcgcattttattgaaatggcactgttatttcaaccatatctttgattctgttacatgacacgactgcaagaagtaaataatagacgccgttgttaaagaattgctatcatatgtgcctaactagagggaatttgagcgtcagacctaatcaaatattacaaaatatctcactctgtcgccagcaatggtgtaatcagcgcagacaaatggcgtaaagatcgcggaaaaacctccccgagtggcatgatagctgcctctgtattgctgatttagtcagccttatttgacttaagggtgccctcgttagtgacaaattgctttcaaggagacagccatgccccacactttgttgaaaaacaaattgcctttggggagacggtaaagccagttgctcttcaataaggaatgtcgaggaggcaatgtaaccgcctctggtagtacacttctctaatccaaaaatcaatttgtattcaagataccgcaaaaaacttatggtttaaaccctgcaggactagtccagaaggtaattatccaagatgtagcatcaagaatccaatgtttacgggaaaaactatggaagtattatgtaagctcagcaagaagcagatcaatatgcggcacatatgcaacctatgttcaaaaatgaagaatgtacagatacaagatcctatactgccagaatacgaagaagaatacgtagaaattgaaaaagaagaaccaggcgaagaaaagaatcttgaagacgtaagcactgacgacaacaatgaaaagaagaagataaggtcggtgattgtgaaagagacatagaggacacatgtaaggtggaaaatgtaagggcggaaagtaaccttatcacaaaggaatcttatcccccactacttatccttttatatttttccgtgtcatttttgcccttgagttttcctatataaggaaccaagttcggcatttgtgaaaacaagaaaaaatttggtgtaagctattttctttgaagtactgaggatacaacttcagagaaatttgtaagtttgtaggtaccagatctggatcccaaaccatgtctccggagaggagaccagttgagattaggccagctacagcagctgatatggccgcggtttgtgatatcgttaaccattacattgagacgtctacagtgaactttaggacagagccacaaacaccacaagagtggattgatgatctagagaggttgcaagatagatacccttggttggttgctgaggttgagggtgttgtggctggtattgcttacgctgggccctggaaggctaggaacgcttacgattggacagttgagagtactgtttacgtgtcacataggcatcaaaggttgggcctaggatctacattgtacacacatttgcttaagtctatggaggcgcaaggttttaagtctgtggttgctgttataggccttccaaacgatccatctgttaggttgcatgaggctttgggatacacagcccggggtacattgcgcgcagctggatacaagcatggtggatggcatgatgttggtttttggcaaagggattttgagttgccagctcctccaaggccagttaggccagttacccaaatctgagtagttagcttaatcacctagagctcgatcggcggcaatagcttcttagcgccatcccgggttgatcctatctgtgttgaaatagttgcggtgggcaaggctctctttcagaaagacaggcggccaaaggaacccaaggtgaggtgggctatggctctcagttccttgtggaagcgcttggtctaaggtgcagaggtgttagcgggatgaagcaaaagtgtccgattgtaacaagatatgttgatcctacgtaaggatattaaagtatgtattcatcactaatataatcagtgtattccaatatgtactacgatttccaatgtctttattgtcgccgtatgtaatcggcgtcacaaaataatccccggtgactttcttttaatccaggatgaaataatatgttattataatttttgcgatttggtccgttataggaattgaagtgtgcttgaggtcggtcgccaccactcccatttcataattttacatgtatttgaaaaataaaaatttatggtattcaatttaaacacgtatacttgtaaagaatgatatcttgaaagaaatatagtttaaatatttattgataaaataacaagtcaggtattatagtccaagcaaaaacataaatttattgatgcaagtttaaattcagaaatatttcaataactgattatatcagctggtacattgccgtagatgaaagactgagtgcgatattatggtgtaatacataggaattcgtttaaacgatctgcgtctaattttcggtccaacttgcacaggaaagacgtcgaccgcggtagctcttgcccagcagactgggcttccagtcctttcgctcgatcgggtccaatgttgtcctcagctgtgaaccggaagcggacgaccaacagtggaagaactgaaaggaacgagccgtctataccttgatgatcggcctctggtgaagggtatcatcgcagccaagcaagctcatgaaaggctgatgggggaggtgtataattatgaggcccacggcgggcttattctttagggaggatctatctcgttgctcaagtgcatggcgcaaagcagttattggagtgcggattttcgttggcatattattcgccacgagttagcagacgaagagaccttcatgaacgtggccaaggccagagttaagcagatgttacgccctgctgcaggcctttctattatccaatagttggttgatctttggaaagagcctcggctgaggcccatactgaaagagatcgatggatatcgatatgccatgttgtttgctagccagaaccagatcacatccgatatgctattgcagcttgacgcagatatggaggataagttgattcatgggatcgctcaggagtagctcatccatgcacgccgacaagaacagaaattccgtcgagttaacgcagccgcttacgacggattcgaaggtcatccattcggaatgtattagtttgcaccagctccgcgtcacacctgtcttcatttgaataagatgttagcaattgtttttagctttgtcttgttgtggcagggcggcaagtgcttcagacatcattctgttttcaaattttatgctggagaacagcttcttaattcctttggaaataatagactgcgtcttaaaattcagatgtctggatatagatatgattgtaaaataacctatttaagtgtcatttagaacataagttttatgaatgttcttccattttcgtcatcgaacgaataagagtaaatacaccttttttaacattacaaataagttcttatacgttgtttatacaccgggaatcatttccattattttcgcgcaaaagtcacggatattcgtgaaagcgacataaactgcgaaatttgcggggagtgtcttgagtttgcctcgaggctagcgcatgcacatagacacacacatcatctcattgatgcttggtaataattgtcattagattgtttttatgcatagatgcactcgaaatcagccaattttagacaagtatcaaacggatgtgacttcagtacattaaaaacgtccgcaatgtgttattaagttgtctaagcgtcaatttgatttacaattgaatatatcctgccccagccagccaacagctcgatttacaattgaatatatcctgccggccggcccacgcgtgtcgaggaattctgatctggcccccatttggacgtgaatgtagacacgtcgaaataaagatttccgaattagaataatttgtttattgctttcgcctataaatacgacggatcgtaatttgtcgttttatcaaaatgtactttcattttataataacgctgcggacatctacatttttgaattgaaaaaaaattggtaattactctttctttttctccatattgaccatcatactcattgctgatccatgtagatttcccggacatgaagccatttacaattgaatatatcctgccgccgctgccgctttgcacccggtggagcttgcatgttggtttctacgcagaactgagccggttaggcagataatttccattgagaactgagccatgtgcaccttccccccaacacggtgagcgacggggcaacggagtgatccacatgggacttttaaacatcatccgtcggatggcgttgcgagagaagcagtcgatccgtgagatcagccgacgcaccgggcaggcgcgcaacacgatcgcaaagtatttgaacgcaggtacaatcgagccgacgttcacgcggaacgaccaagcaagcttggctgccatttttggggtgaggccgttcgcggccgaggggcgcagcccctggggggatgggaggcccgcgttagcgggccgggagggttcgagaagggggggcaccccccttcggcgtgcgcggtcacgcgcacagggcgcagccctggttaaaaacaaggtttataaatattggtttaaaagcaggttaaaagacaggttagcggtggccgaaaaacgggcggaaacccttgcaaatgctggattttctgcctgtggacagcccctcaaatgtcaataggtgcgcccctcatctgtcagcactctgcccctcaagtgtcaaggatcgcgcccctcatctgtcagtagtcgcgcccctcaagtgtcaataccgcagggcacttatccccaggcttgtccacatcatctgtgggaaactcgcgtaaaatcaggcgttttcgccgatttgcgaggctggccagctccacgtcgccggccgaaatcgagcctgcccctcatctgtcaacgccgcgccgggtgagtcggcccctcaagtgtcaacgtccgcccctcatctgtcagtgagggccaagttttccgcgaggtatccacaacgccggcggccgcggtgtctcgcacacggcttcgacggcgtttctggcgcgtttgcagggccatagacggccgccagcccagcggcgagggcaaccagcccggtgagcgtcggaaagggtcgacggatcttttccgctgcataaccctgcttcggggtcattatagcgattttttcggtatatccatcctttttcgcacgatatacaggattttgccaaagggttcgtgtagactttccttggtgtatccaacggcgtcagccgggcaggataggtgaagtaggcccacccgcgagcgggtgttccttcttcactgtcccttattcgcacctggcggtgctcaacgggaatcctgctctgcgaggctggccggctaccgccggcgtaacagatgagggcaagcggatggctgatgaaaccaagccaaccaggaagggcagcccacctatcaaggtgtactgccttccagacgaacgaagagcgattgaggaaaaggcggcggcggccggcatgagcctgtcggcctacctgctggccgtcggccagggctacaaaatcacgggcgtcgtggactatgagcacgtccgcgagctggcccgcatcaatggcgacctgggccgcctgggcggcctgctgaaactctggctcaccgacgacccgcgcacggcgcggttcggtgatgccacgatcctcgccctgctggcgaagatcgaagagaagcaggacgagcttggcaaggtcatgatgggcgtggtccgcccgagggcagagccatgacttttttagccgctaaaacggccggggggtgcgcgtgattgccaagcacgtccccatgcgctccatcaagaagagcgacttcgcggagctggtattcgtgcagggcaagattcggaataccaagtacgagaaggacggccagacggtctacgggaccgacttcattgccgataaggtggattatctggacaccaaggcaccaggcgggtcaaatcaggaataagggcacattgccccggcgtgagtcggggcaatcccgcaaggagggtgaatgaatcggacgtttgaccggaaggcatacaggcaagaactgatcgacgcggggttttccgccgaggatgccgaaaccatcgcaagccgcaccgtcatgcgtgcgccccgcgaaaccttccagtccgtcggctcgatggtccagcaagctacggccaagatcgagcgcgacagcgtgcaactggctccccctgccctgcccgcgccatcggccgccgtggagcgttcgcgtcgtctcgaacaggaggcggcaggtttggcgaagtcgatgaccatcgacacgcgaggaactatgacgaccaagaagcgaaaaaccgccggcgaggacctggcaaaacaggtcagcgaggccaagcaggccgcgttgctgaaacacacgaagcagcagatcaaggaaatgcagctttccttgttcgatattgcgccgtggccggacacgatgcgagcgatgccaaacgacacggcccgctctgccctgttcaccacgcgcaacaagaaaatcccgcgcgaggcgctgcaaaacaaggtcattttccacgtcaacaaggacgtgaagatcacctacaccggcgtcgagctgcgggccgacgatgacgaactggtgtggcagcaggtgttggagtacgcgaagcgcacccctatcggcgagccgatcaccttcacgttctacgagctttgccaggacctgggctggtcgatcaatggccggtattacacgaaggccgaggaatgcctgtcgcgcctacaggcgacggcgatgggcttcacgtccgaccgcgttgggcacctggaatcggtgtcgctgctgcaccgcttccgcgtcctggaccgtggcaagaaaacgtcccgttgccaggtcctgatcgacgaggaaatcgtcgtgctgtttgctggcgaccactacacgaaattcatatgggagaagtaccgcaagctgtcgccgacggcccgacggatgttcgactatttcagctcgcaccgggagccgtacccgctcaagctggaaaccttccgcctcatgtgcggatcggattccacccgcgtgaagaagtggcgcgagcaggtcggcgaagcctgcgaagagttgcgaggcagcggcctggtggaacacgcctgggtcaatgatgacctggtgcattgcaaacgctagggccttgtggggtcagttccggctgggggttcagcagccagcgctttactggcatttcaggaacaagcgggcactgctcgacgcacttgcttcgctcagtatcgctcgggacgcacggcgcgctctacgaactgccgataaacagaggattaaaattgacaattgtgattaaggctcagattcgacggcttggagcggccgacgtgcaggatttccgcgagatccgattgtcggccctgaagaaagctccagagatgttcgggtccgtttacgagcacgaggagaaaaagcccatggaggcgttcgctgaacggttgcgagatgccgtggcattcggcgcctacatcgacggcgagatcattgggctgtcggtcttcaaacaggaggacggccccaaggacgctcacaaggcgcatctgtccggcgttttcgtggagcccgaacagcgaggccgaggggtcgccggtatgctgctgcgggcgttgccggcgggtttattgctcgtgatgatcgtccgacagattccaacgggaatctggtggatgcgcatcttcatcctcggcgcacttaatatttcgctattctggagcttgttgtttatttcggtctaccgcctgccgggcggggtcgcggcgacggtaggcgctgtgcagccgctgatggtcgtgttcatctctgccgctctgctaggtagcccgatacgattgatggcggtcctgggggctatttgcggaactgcgggcgtggcgctgttggtgttgacaccaaacgcagcgctagatcctgtcggcgtcgcagcgggcctggcgggggcggtttccatggcgttcggaaccgtgctgacccgcaagtggcaacctcccgtgcctctgctcacctttaccgcctggcaactggcggccggaggacttctgctcgttccagtagctttagtgtttgatccgccaatcccgatgcctacaggaaccaatgttctcggcctggcgtggctcggcctgatcggagcgggtttaacctacttcctttggttccgggggatctcgcgactcgaacctacagttgtttccttactgggctttctcagcccccgagcgcttagtgggaatttgtaccccttatcgaaccgggagcacaggatgacgcctaacaattcattcaagccgacaccgcttcgcggcgcggcttaattcaggagttaaacatcatgagggaagcggtgatcgccgaagtatcgactcaactatcagaggtagttggcgtcatcgagcgccatctcgaaccgacgttgctggccgtacatttgtacggctccgcagtggatggcggcctgaagccacacagtgatattgatttgctggttacggtgaccgtaaggcttgatgaaacaacgcggcgagctttgatcaacgaccttttggaaacttcggcttcccctggagagagcgagattctccgcgctgtagaagtcaccattgttgtgcacgacgacatcattccgtggcgttatccagctaagcgcgaactgcaatttggagaatggcagcgcaatgacattcttgcaggtatcttcgagccagccacgatcgacattgatctggctatcttgctgacaaaagcaagagaacatagcgttgccttggtaggtccagcggcggaggaactctttgatccggttcctgaacaggatctatttgaggcgctaaatgaaaccttaacgctatggaactcgccgcccgactgggctggcgatgagcgaaatgtagtgcttacgttgtcccgcatttggtacagcgcagtaaccggcaaaatcgcgccgaaggatgtcgctgccgactgggcaatggagcgcctgccggcccagtatcagcccgtcatacttgaagctaggcaggcttatcttggacaagaagatcgcttggcctcgcgcgcagatcagttggaagaatttgttcactacgtgaaaggcgagatcaccaaggtagtcggcaaataatgtctaacaattcgttcaagccgacgccgcttcgcggcgcggcttaactcaagcgttagagagctggggaagactatgcgcgatctgttgaaggtggttctaagcctcgtcttgcgatggcatttcgatccattcccattccgcgctcaagatggcttcccctcggcagttcatcagggctaaatcaatctagccgacttgtccggtgaaatgggctgcactccaacagaaacaatcaaacaaacatacacagcgacttattcacacgagctca

SEQ ID NO: 70 - DNA, 23255 bp, Artificial sequence
  plasmid pDAB108225
aattacaacggtatatatcctgccagtcagcatcatcacaccaaaagttaggcccgaatagtttgaaattagaaagctcgcaattgaggtctacaggccaaattcgctcttagccgtacaatattactcaccggatcctaaccggtttaattaaggcgcgccatgcccgggcaagcggccgcacaagtttgtacaaaaaagcaggcttctagacctaggactaggcactgagtgactcactgacctgactgagtgactggcggccgcatcagtaagtgcatataaagaaagtaataagtagatgagtttggtaattacatgagatcgacagaggaattacgacgttcttgccatcaaaaagagattccaaatttgtaaagagccatatgtttgttgggcaattgagattgagtcttgccaatccttctttggaagttgacaatttaaaaattcgaagccagatttactcctaattaattattgagcttgaagtcttaattaccgattacatctctgagcagtagtagtcgatgatctttcccggtcactaattttactcaagcgaatcgatttttactttagtttagctaaccgtacgccattacagtttagagagcagcaagggtaagaacattattaaaacataaagtaaacctctcatttattacggtgtagtgctaattacattagcctcaaacatcctaagcttacagttttataaaacacacacgatgactgtgtatagtattaacatacatcaatagcaacactcatgatcatcgtgctaggccgggcttggactgggtgacctaagtgattaagctaactactcaaagcgcattcgttggctcatagacaaaggcagcatcttcagtctcaagatcaatcctcggatcatttctcagagcattaagacgcctcaggtaacatgcaccacgcaaaatctgaaggttgatctggacaacacatgggtactcattagagacagcaggatcaagatatgttcctttgatgaagtcattgaaggctccaatggctggaccacaccagacttgatagtccatgacacgatcaggagcacccatgttggcccaacgtgatgcaagaccaagataccatctgaaacacaaagacatcttgagtttggggtcatgttccgctctctgtatcttctctggattcttcaaaccattgatgtaaaagtccttggtctcttcccagacctcttgaagtgccctcttgaagatcctcttctcgatcctttcaagttcagcaggaggcattgaatcgaaagagtcgtacttgcaaaagagttcgtacaatttgttagctcttgatgggaacattgttcccttcttgagaacttggagtttcacaccttcctcaaacatatcagctgctggagccatgcaaatgtcactgtaggtggcttgactgagttgttttctcacgttgtcacatgtcccggactgtttagcaacttgattgacagtcccagtcactatgaaggcagctcccattgtgagggcagccgcagcagcttgtgggcagccaacaccgcctccagctccaactctgactctaaggtgcgcaggataaccacactctctgtgcagtctgttcctaaggttgatgatcaaaggcaagatgacgtggatgggacggttgtcagtgtgaccaccagaatcagcttcaacagcgatgtcgtctgcgacaggaacacgacgggcaagttcggcttgttcttgtgttatctcaccagaagctatgagtttctcaaggaggtgttccggagccggtctgatgaacatttcggcgagttctgttctggacacttttccaatgatacggtttctgatgttgacactcccatcagcgttccttgagagtccggctgcacggtaacgaacaacttggggagtgagggtcatgaatgcagaagcctccaccacagtaacgcccttttcgaggaagagatcaacattccccttttccaagttgctgtcaaaaggtgaatgaatgaggttcacagcatatggtccttgaggcagagccgcttgtatcttctccaaagctgccctcacatggtgcattggaagcccacccgctccaaaagaacccaatatcttcctcttcccagcagcaatgacaaggtccgcagacgcaattcccttggccattgctccagtgtacagaggtgctgacacattgtacgtttccatgaaggacttgtcaccaagatcacttatggagcatggtttgatactgacaatccttgaagaagttgcaggtttggattcaaactgcaccaaattggagttttcaacaccaagatacaatggattgtccacttcaagcaggacatctctcaactgagtcggactgagtgcaactccagttttcccagggtccgcttttgcgctgggtggctgttgttgaacatccggaatggcttgaggttttgcactgacaacacgaactctgagttctttggcttcatacacacggagaccatcaacccaaagtgctccatctgccactatgtcaacgtagcctccattttcaggagaggctgtgattgaaactatgtgcacctcacagtccatcgcacggttctttggtgtcaattgaccacggtacttccacgccgtttttccaggggcatgggcaaaggtcggattgctcacattgtattctcccggtatgttctggtccaccgcaaatgcctcaatgagctggaacattgactcaattcccaaagatccaggcatcacaggatcaaaccaaaagtgacaagagaagaaccagtcttgtgggttaacatctttgtgtccatgcgcatatcctttcccatgcagcccagaatcaggagcaatgttgaggtaatccaaatactcacactgttctgaccttctgagaacttgagcattagttgcatctggaagtttctcagtcagctgttctttgcctttggctgatgcgatttcaactcttctcacactcgtgttgttagttttgcaccaaggctccgtctttttcccattgtcaagtccagcttgctgagcaaacacctctggagtgaaccatccaaaggaagtgcttcctttgtagaaaaccacgccatcaacagacaactcaaacgtgaatctgtgaatccccatctttcccaacattgcatatccagtgcacttggtcacattccttatggttttccccctcacatccacatctggcctcaccatttcagcacttgcatcaaggttcctaaagagaatgtcatctttgtccatcgtcagtggtgctttcaacacactggtgagaacaccggatgtctgaagtccgatttccatgatgatggaataaggcatgtgcccatcattgcaagaaccatcaaagaaccacgcatcttgaggacagtcaaactcccccaccattgtgcctttgctgggattgcaatcaacattcaggaacttgccatgttccatgtttgtgacttcaacaactctagtcacaagagccaaatcaaaagcagggcttctgctcgtatttgacttatcaaatcttgcgaactctggtcccaagcagttgctaacttttccacacatgaactctgacatgttgtaccagttcagaggcatttctccagctttgcaattgttgtcaagtgggttgccagggaaagggatgaagcaaattgccctcggagggtaagaactaggggagaagaacggcgtcgggttgccaggaagttttgacatgggatgccaggacatttctttcggagcgagagcgtcacccttgaggatatgttcaggaagtgcaactggctttggcgcaagaacatctgctgagaaagcaggcttcgcaggggcagcagaagcactagcactggcaccagagctggccttggacgcttccggtcccacagtggctgcaccgttagcaaaaacgggctgaactttggaggggttcttgttcgtggatctcttctgcatcttgagagcaatgcccttgaagtccacgacgatctttttgttaagatccccctttccgtagtcgctgattctatcaaggctgaaatcttgacccttttcgaaatcaacgtcaatgatgttgacgtcagcaatggcgtacggatcgttatcctcgtcgaatcccatctctttgatctccatgacgtagaccaactttcccttatgaggagatatctgacccctacacctaactttgttcgggtgtccgttgacgggtctgaagtcaaatggtccggtggtaaggtgcaaaccgagccagatcatgtacatcttgagcatttgtgaacaaccgtcgctgacaagagatccagccatgacttgatccttaacaaaatggcatgggaagtaccaatggtccctctccaagattttctcaccaaccaactgacccaaaccgtacacacctcccttatggtcaatgctggtgactctatcaatcatgagcatcttacgtgcgcagagtttgtagttgatctccggcatgccattctttgagccaaaaacggaagcccaatctttgtcaaccaaggtctgcatctccttttcgttgagttttgttttgtgaaggcagggagcgacagcatagggagaaacatcttgctttggaatcttagctctggcagccaaatcccctcttgtgaacaccacaccctttcccgcatcaagctcctcatttgtgaagaagccagcacagccatctctcatctcaatgagaagcctcccattgacatagcagtcatactcaaagaagaacatggagatgccaccatccaaacgtttggcaaaaccggtcactctgatgtcatactcaagggtctctccctcatgggcaaccccatagaatgtcaacgtggtgttgagcagacggtaaactctgtcaccttggttctggaaatcaattcccatgtatgatatcagcatcaaatcgcactgtccactctcaaccagaactgcccagggacaatcacctccctcagacaattcgccattcactggaagatcatactcagtgaccattctggcaccaactctgtagttgttgacctcggcatccatgagtgtgacccttgtcacaagcaggtattcacgagcaggcagcctcacccttctggggtacttgtctatgacagcaaactccggaccaaaaaccttagctatgtcaccctctgcaaactccaggagttcctcatagttgaacacctcagttttgccagaggtcagttcctccttggtcatctcccaacatggcttcttgttggtcttgacacgaagcgccatttttggttgtggatccgttttgctatttgtgtatgttttcttgttttggtttgagtttaaccatcattctcttctctctatttatagagagaagaggttggcacgcagcactgcgacatgagagaaagacacgggtgaagaggcgggagctgaggtggcagcatgcatgcatgcatggccagtcgtgtcatagtgagaagaggagaaagctgaggtggcaacgtgtatggccagtggtgtcatagtgtgaaagctgacgtggcagcatgcatggtgagtgtgaaaaaggcgccacagtgcagatgttactgaacaaaagcggtgtgccatgcaacttttgcccatcgtcgtctttctcatccaagttcctctttataatatcttttaccaaatcatattttaatataaattcattttatttttaaataaagtaatattatatccataaatattaactctcatttaacacattttcaaatttaacacttctgtaaataaatttattaacaaaaacttgtaaatatgttcaaataaatccataaatattaactttcattttattaacaaaaaaatctttactataagctgcggccgcttaattaagatgagtgatactcaggactcaggactcactctgctgatcactagtgctagcctcgaggtcgacacaactttgtatacaaaagttgtctaggatctgcttttacatgcgagacacatcttctaaagtaattttaataatagttactatattcaagatttcatatatcaaatactcaatattacttctaaaaaattaattagatataattaaaatattacttttttaattttaagtttaattgttgaatttgtgactattgatttattattctactatgtttaaattgttttatagatagtttaaagtaaatataagtaatgtagtagagtgttagagtgttaccctaaaccataaactataagatttatggtggactaattttcatatatttcttattgcttttaccttttcttggtatgtaagtccgtaactggaattactgtgggttgccatgacactctgtggtcttttggttcatgcatggatcttgcgcaagaaaaagacaaagaacaaagaaaaaagacaaaacagagagacaaaacgcaatcacacaaccaactcaaattagtcactggctgatcaagatcgccgcgtccatgtatgtctaaatgccatgcaaagcaacacgtgcttaacatgcactttaaatggctcacccatctcaacccacacacaaacacattgcctttttcttcatcatcaccacaaccacctgtatatattcattctcttccgccacctcaatttcttcacttcaacacacgtcaacctgcatatgcgtgtcatcccatgcccaaatctccatgcatgttccaaccaccttctctcttatataatacctataaatacctctaatatcactcacttctttcatcatccatccatccagagtactactactctactactataataccccaacccaactcatattcaatactactctaggatccacaaccaaaaatggctgcaaggaacgtgagtgcggctcatgagatgcatgacgagaagaggatagctgttgtgggcatggctgttcagtatgctggatgcaaaacgaaagacgagttctgggaagttctcatgaatggaaaagttgagagcaaagtgatcagcgacaaacgtcttggttcaaattaccgtgctgaacactacaaagctgaaaggagcaagtatgctgacaccttctgcaatgagacatatggaactcttgatgagaacgaaatagacaatgagcatgaactccttttgaaccttgccaaacaagccttggctgaaacatctgtcaaagattcaacaagatgtggcatagtttctggatgcctcagcttcccgatggacaacctccaaggtgaactcttgaatgtgtaccagaaccatgttgagaagaaacttggtgccagagttttcaaagatgcctctcactggtcagaaagagaacagtccaacaaaccagaggctggtgacagaagaatcttcatggaccctgcttcctttgttgctgaggaactcaatcttggcgctctccactactctgttgatgctgcctgtgccactgcgctctatgtgctcagactggcgcaagatcacttggtctctggtgcagctgatgtgatgctttgtggtgcaacatgcctgccggagccgtttttcatactctctgggttctcaaccttccaagccatgcctgttggaacgggtcagaatgtgtccatgccgctgcacaaagattctcaaggattgacccctggtgaaggaggttccatcatggtcctcaaacgtttggatgacgcaatcagagatggagatcacatctatggaacacttttgggagccaatgtcagcaacagtggcactggtctgccacttaaaccccttttgccgtcagagaaaaagtgcctcatggacacctacacacgtatcaatgtgcatccccacaagattcagtatgttgaatgccatgcaactgggactccacaaggtgatcgtgtggaaattgatgctgtgaaggcttgctttgaaggcaaagtcccacgttttggaaccacaaaagggaactttggacacacattggtggcagctgggtttgctggcatgtgcaaagtgcttctctccatgaagcacgggatcattccacccactccgggaatagatgacgaaacgaagatggaccctctggttgtctctggtgaggccattccctggccagaaacgaatggagaaccgaagcgtgctggtctctcagcgtttggatttggtgggaccaatgctcatgctgtctttgaggaacatgacccaagcaatgctgcatgcactggccatgactccatttctgctctctctgcacgttgtggtggtgagtcaaacatgagaatagcaatcactgggatggatgccacttttggtgctttgaaaggattggatgcttttgaaagggccatctacactggtgctcatggtgctataccactcccagaaaagagatggagattcctggggaaagacaaggacttccttgatctttgtggagtcaaagcaacaccgcatggctgttacattgaagatgttgaagttgatttccagaggctgaggactccaatgactcctgaagatatgctcttgcctcaacagcttctggctgtcaccacaattgatagggccatattggactctggcatgaagaaaggtggaaatgtggctgtctttgtggggttggggaccgatcttgaactctaccgtcaccgtgcaagggttgctctcaaggagagagtgaggcctgaagccagcaagaaactcaatgacatgatgcagtacatcaatgattgtgggacaagcacttcttacaccagctacataggcaacttggttgcaacaagggtcagttcacaatggggcttcacgggaccttccttcacaatcacagaaggcaacaattctgtgtacagatgtgctgaacttggcaaatacctcttggaaacgggagaggttgatggggttgtggttgcgggtgttgatctctgtgggagtgctgagaacctttacgtcaagtcaaggcgtttcaaggtgtctacatctgacaccccgagagccagctttgatgcagctgctgatggttactttgttggagagggctgtggtgcatttgtgctcaagcgtgagacaagctgcaccaaggatgacagaatctatgcttgcatggatgccatagttcctggaaatgttccatctgcatgtttgagagaggcattggatcaagccagagtcaagcctggagacatcgagatgttggagctttctgctgattcagcgaggcatttgaaggacccgtctgttctcccaaaggaactcactgctgaggaagagattggcggacttcagacgattcttcgtgacgatgacaagctcccaaggaatgttgcaactggaagtgtcaaggccactgttggtgacactggttatgcttctggtgctgccagtttgattaaggctgcgctttgcatctacaaccgttacctgcccagcaatggagatgactgggatgaacctgcacctgaagcaccctgggacagcacactctttgcgtgccagacctcaagagcttggttgaagaaccctggtgagagacgttatgcggctgtttccggagtcagtgaaaccagaagttgctacagtgtgctgctttctgaagcagagggacactacgagagagagaacagaatcagtttggatgaggaagcacccaagctcattgtgttgagagcagactcccatgaagagattcttggaagattggacaagataagggaaaggttcttgcagcccacgggtgctgcacccagagagtctgaattgaaggcgcaagcccgtaggatctttcttgaactccttggtgagacccttgcccaagatgcagcttcatctggaagtcagaagccccttgctctcagcttggtctccactccatccaagctccagagagaggtggaacttgcggcaaaaggcattccgagatgtctcaagatgagacgtgattggagttcccctgctggaagcagatatgcgcctgagcctttggccagtgacagagttgccttcatgtatggagaaggaaggagcccttactatggcatcacacaagacattcataggatttggcctgaacttcatgaggtcatcaatgagaaaacaaaccgtctctgggctgaaggtgacagatgggtcatgccaagggccagcttcaagagtgagcttgagtcacaacagcaagagtttgacagaaacatgattgaaatgttccgtcttggaatcctcacctcaattgccttcacaaacctggcgagagatgttctcaacatcacgcccaaagcagcctttggactcagtttgggagagatttccatgatctttgctttctccaagaaaaacggtttgataagcgatcagttgacaaaggatttgagagagtcagatgtctggaacaaagctctggctgttgagttcaatgcgctcagagaagcctggggcattccacagtctgtcccaaaagatgagttctggcaaggttacatagtgaggggaacgaaacaagacatagaagcagccatagcaccagactcaaagtatgtgaggttgaccatcatcaatgatgccaacactgctctcatcagtggaaagcctgatgcatgcaaagctgcgattgctcgtcttggtggcaacatccctgcgcttccagtcactcaaggcatgtgtgggcattgcccagaggtgggaccttacaccaaggacatcgcaaagatccacgccaaccttgagttccctgtggttgatggtcttgatctctggactaccataaaccagaagaggcttgtgccaagagccacgggtgccaaagatgaatgggctccttcatcctttggggagtatgctggacagctctatgagaaacaagccaacttccctcagatagttgaaaccatctacaagcagaactatgatgtgtttgttgaagttgggccaaacaatcacagaagcacagcagtgagaaccacgcttggaccacagagaaaccaccttgctggtgccatagacaagcagaacgaggatgcttggacgacaatagtcaagctcgtggcttcattgaaggctcaccttgttcctggagtgaccatcagtccgctctaccactccaagctcgttgcagaggctgaggcttgttatgctgcgctctgtaaaggtgagaaacccaagaaaaacaagtttgtgagaaagattcagttgaatggcagattcaacagcaaggcagaccccatctcctcagcagaccttgcatccttcccacctgcggaccctgcgattgaagctgccatctcttcaaggatcatgaagcctgtggctccgaaattctatgcgcgtctcaacattgatgagcaagatgagaccagagatccgatcttgaacaaggacaatgcgccttccagctccagctcttccagcagttcctcttccagcagttcatctccgtctcctgctccttcagctccagttcagaagaaagctgccccagctgcggagacaaaagctgttgccagtgctgatgcacttcgtagtgccctgcttgatcttgactccatgcttgcgctcagctctgcaagtgcttctggcaaccttgttgagactgcgccatctgatgccagtgtcattgtccctccgtgcaacattgctgatcttggcagcagagctttcatgaaaacttatggtgtttctgcgcctctgtacaccggtgcaatggccaagggaattgcctctgcggacttggtgatcgcagctggaaggcaaggaatccttgcgtcatttggtgctggaggccttccaatgcaagttgtgcgtgagtccattgaaaagattcaagctgccctgcccaatggaccatatgctgtcaacctcatccattctccttttgacagcaaccttgagaagggaaatgttgatctcttcttggaaaagggtgtcacttttgttgaggcttcagccttcatgacgttgacaccgcaagttgtcagatacagagcggctgggttgacgaggaatgcagatgggtcagtcaacataaggaacagaatcattgggaaagtctccagaactgagctggctgaaatgttcatgcgtcctgcacctgagcatcttttgcagaagctcattgcttctggggagatcaatcaagaacaagctgagttggccagacgtgttcctgtggctgatgacattgcggttgaagctgattctggtggacacactgacaaccgtccaatccatgtcattctgcctctgattatcaacctgagggataggcttcacagagagtgtggatacccagcaaacctgagggttcgtgttggtgctgggggtggcattgggtgtccccaagctgcgctggcaactttcaacatgggtgcctctttcattgtcactggaacagtgaaccaagttgccaaacaatctgggacgtgtgacaatgtgaggaaacagcttgcgaaagcaacttactcagatgtttgcatggcaccggcagctgacatgtttgaggaaggtgtgaaacttcaagttttgaagaaaggaacaatgttcccttcaagagccaacaaactctatgagttgttctgcaagtatgattcttttgagtccatgcctccagcagagcttgcgagggttgagaaaagaatcttcagtcgtgcattggaagaggtctgggatgagaccaagaacttctacatcaaccgtctccacaacccagagaagatacagagggctgagagggaccccaaactgaagatgtcactgtgtttcagatggtatctgtccctggcttcaaggtgggccaacactggagcttctgacagagtcatggactaccaagtttggtgtggtcctgccattggttcattcaatgatttcatcaaaggaacttaccttgatccggcagtggcaaatgagtacccgtgtgttgtgcagatcaacaaacagattcttagaggagcgtgcttcttgaggcgtcttgaaatactgagaaatgcaaggctttcagatggtgcagctgcacttgtggcgagcattgatgacacatatgtccctgctgagaagctgtgagtagttagcttaatcacttaggtcacctcgagtatcaaaatctatttagaaatacacaatattttgttgcaggcttgctggagaatcgatctgctatcataaaaattacaaaaaaattttatttgcctcaattattttaggattggtattaaggacgcttaaattatttgtcgggtcactacgcatcattgtgattgagaagatcagcgatacgaaatattcgtagtactatcgataatttatttgaaaattcataagaaaagcaaacgttacatgaattgatgaaacaatacaaagacagataaagccacgcacatttaggatattggccgagattactgaatattgagtaagatcacggaatttctgacaggagcatgtcttcaattcagcccaaatggcagttgaaatactcaaaccgccccatatgcaggagcggatcattcattgtttgtttggttgcctttgccaacatgggagtccaaggttggcgcgccgaattcgcggccgcttaattaactactgtcactgaggccgtagacgagtacggactgatctaactagtgctagcctcgaggtcgacacccagctttcttgtacaaagtggttgcggccgcttaattaaatttaaattcaattaatgcaatcttgattttcaacaacgaaggtaatggcgtaaaagaaaaaatgtatgttattgtattgatctttcatgatgttgaagcgtgccataatatgatgatgtataattaaaatattaactgtcgcattttattgaaatggcactgttatttcaaccatatctttgattctgttacatgacacgactgcaagaagtaaataatagacgccgttgttaaagaattgctatcatatgtgcctaactagagggaatttgagcgtcagacctaatcaaatattacaaaatatctcactctgtcgccagcaatggtgtaatcagcgcagacaaatggcgtaaagatcgcggaaaaacctccccgagtggcatgatagctgcctctgtattgctgatttagtcagccttatttgacttaagggtgccctcgttagtgacaaattgctttcaaggagacagccatgccccacactttgttgaaaaacaaattgcctttggggagacggtaaagccagttgctcttcaataaggaatgtcgaggaggcaatgtaaccgcctctggtagtacacttctctaatccaaaaatcaatttgtattcaagataccgcaaaaaacttatggtttaaaccctgcaggactagtccagaaggtaattatccaagatgtagcatcaagaatccaatgtttacgggaaaaactatggaagtattatgtaagctcagcaagaagcagatcaatatgcggcacatatgcaacctatgttcaaaaatgaagaatgtacagatacaagatcctatactgccagaatacgaagaagaatacgtagaaattgaaaaagaagaaccaggcgaagaaaagaatcttgaagacgtaagcactgacgacaacaatgaaaagaagaagataaggtcggtgattgtgaaagagacatagaggacacatgtaaggtggaaaatgtaagggcggaaagtaaccttatcacaaaggaatcttatcccccactacttatccttttatatttttccgtgtcatttttgcccttgagttttcctatataaggaaccaagttcggcatttgtgaaaacaagaaaaaatttggtgtaagctattttctttgaagtactgaggatacaacttcagagaaatttgtaagtttgtaggtaccagatctggatcccaaaccatgtctccggagaggagaccagttgagattaggccagctacagcagctgatatggccgcggtttgtgatatcgttaaccattacattgagacgtctacagtgaactttaggacagagccacaaacaccacaagagtggattgatgatctagagaggttgcaagatagatacccttggttggttgctgaggttgagggtgttgtggctggtattgcttacgctgggccctggaaggctaggaacgcttacgattggacagttgagagtactgtttacgtgtcacataggcatcaaaggttgggcctaggatctacattgtacacacatttgcttaagtctatggaggcgcaaggttttaagtctgtggttgctgttataggccttccaaacgatccatctgttaggttgcatgaggctttgggatacacagcccggggtacattgcgcgcagctggatacaagcatggtggatggcatgatgttggtttttggcaaagggattttgagttgccagctcctccaaggccagttaggccagttacccaaatctgagtagttagcttaatcacctagagctcgatcggcggcaatagcttcttagcgccatcccgggttgatcctatctgtgttgaaatagttgcggtgggcaaggctctctttcagaaagacaggcggccaaaggaacccaaggtgaggtgggctatggctctcagttccttgtggaagcgcttggtctaaggtgcagaggtgttagcgggatgaagcaaaagtgtccgattgtaacaagatatgttgatcctacgtaaggatattaaagtatgtattcatcactaatataatcagtgtattccaatatgtactacgatttccaatgtctttattgtcgccgtatgtaatcggcgtcacaaaataatccccggtgactttcttttaatccaggatgaaataatatgttattataatttttgcgatttggtccgttataggaattgaagtgtgcttgaggtcggtcgccaccactcccatttcataattttacatgtatttgaaaaataaaaatttatggtattcaatttaaacacgtatacttgtaaagaatgatatcttgaaagaaatatagtttaaatatttattgataaaataacaagtcaggtattatagtccaagcaaaaacataaatttattgatgcaagtttaaattcagaaatatttcaataactgattatatcagctggtacattgccgtagatgaaagactgagtgcgatattatggtgtaatacataggaattcgtttaaacgatctgcgtctaattttcggtccaacttgcacaggaaagacgtcgaccgcggtagctcttgcccagcagactgggcttccagtcctttcgctcgatcgggtccaatgttgtcctcagctgtgaaccggaagcggacgaccaacagtggaagaactgaaaggaacgagccgtctataccttgatgatcggcctctggtgaagggtatcatcgcagccaagcaagctcatgaaaggctgatgggggaggtgtataattatgaggcccacggcgggcttattctttagggaggatctatctcgttgctcaagtgcatggcgcaaagcagttattggagtgcggattttcgttggcatattattcgccacgagttagcagacgaagagaccttcatgaacgtggccaaggccagagttaagcagatgttacgccctgctgcaggcctttctattatccaatagttggttgatctttggaaagagcctcggctgaggcccatactgaaagagatcgatggatatcgatatgccatgttgtttgctagccagaaccagatcacatccgatatgctattgcagcttgacgcagatatggaggataagttgattcatgggatcgctcaggagtagctcatccatgcacgccgacaagaacagaaattccgtcgagttaacgcagccgcttacgacggattcgaaggtcatccattcggaatgtattagtttgcaccagctccgcgtcacacctgtcttcatttgaataagatgttagcaattgtttttagctttgtcttgttgtggcagggcggcaagtgcttcagacatcattctgttttcaaattttatgctggagaacagcttcttaattcctttggaaataatagactgcgtcttaaaattcagatgtctggatatagatatgattgtaaaataacctatttaagtgtcatttagaacataagttttatgaatgttcttccattttcgtcatcgaacgaataagagtaaatacaccttttttaacattacaaataagttcttatacgttgtttatacaccgggaatcatttccattattttcgcgcaaaagtcacggatattcgtgaaagcgacataaactgcgaaatttgcggggagtgtcttgagtttgcctcgaggctagcgcatgcacatagacacacacatcatctcattgatgcttggtaataattgtcattagattgtttttatgcatagatgcactcgaaatcagccaattttagacaagtatcaaacggatgtgacttcagtacattaaaaacgtccgcaatgtgttattaagttgtctaagcgtcaatttgatttacaattgaatatatcctgccccagccagccaacagctcgatttacaattgaatatatcctgccggccggcccacgcgtgtcgaggaattctgatctggcccccatttggacgtgaatgtagacacgtcgaaataaagatttccgaattagaataatttgtttattgctttcgcctataaatacgacggatcgtaatttgtcgttttatcaaaatgtactttcattttataataacgctgcggacatctacatttttgaattgaaaaaaaattggtaattactctttctttttctccatattgaccatcatactcattgctgatccatgtagatttcccggacatgaagccatttacaattgaatatatcctgccgccgctgccgctttgcacccggtggagcttgcatgttggtttctacgcagaactgagccggttaggcagataatttccattgagaactgagccatgtgcaccttccccccaacacggtgagcgacggggcaacggagtgatccacatgggacttttaaacatcatccgtcggatggcgttgcgagagaagcagtcgatccgtgagatcagccgacgcaccgggcaggcgcgcaacacgatcgcaaagtatttgaacgcaggtacaatcgagccgacgttcacgcggaacgaccaagcaagcttggctgccatttttggggtgaggccgttcgcggccgaggggcgcagcccctggggggatgggaggcccgcgttagcgggccgggagggttcgagaagggggggcaccccccttcggcgtgcgcggtcacgcgcacagggcgcagccctggttaaaaacaaggtttataaatattggtttaaaagcaggttaaaagacaggttagcggtggccgaaaaacgggcggaaacccttgcaaatgctggattttctgcctgtggacagcccctcaaatgtcaataggtgcgcccctcatctgtcagcactctgcccctcaagtgtcaaggatcgcgcccctcatctgtcagtagtcgcgcccctcaagtgtcaataccgcagggcacttatccccaggcttgtccacatcatctgtgggaaactcgcgtaaaatcaggcgttttcgccgatttgcgaggctggccagctccacgtcgccggccgaaatcgagcctgcccctcatctgtcaacgccgcgccgggtgagtcggcccctcaagtgtcaacgtccgcccctcatctgtcagtgagggccaagttttccgcgaggtatccacaacgccggcggccgcggtgtctcgcacacggcttcgacggcgtttctggcgcgtttgcagggccatagacggccgccagcccagcggcgagggcaaccagcccggtgagcgtcggaaagggtcgacggatcttttccgctgcataaccctgcttcggggtcattatagcgattttttcggtatatccatcctttttcgcacgatatacaggattttgccaaagggttcgtgtagactttccttggtgtatccaacggcgtcagccgggcaggataggtgaagtaggcccacccgcgagcgggtgttccttcttcactgtcccttattcgcacctggcggtgctcaacgggaatcctgctctgcgaggctggccggctaccgccggcgtaacagatgagggcaagcggatggctgatgaaaccaagccaaccaggaagggcagcccacctatcaaggtgtactgccttccagacgaacgaagagcgattgaggaaaaggcggcggcggccggcatgagcctgtcggcctacctgctggccgtcggccagggctacaaaatcacgggcgtcgtggactatgagcacgtccgcgagctggcccgcatcaatggcgacctgggccgcctgggcggcctgctgaaactctggctcaccgacgacccgcgcacggcgcggttcggtgatgccacgatcctcgccctgctggcgaagatcgaagagaagcaggacgagcttggcaaggtcatgatgggcgtggtccgcccgagggcagagccatgacttttttagccgctaaaacggccggggggtgcgcgtgattgccaagcacgtccccatgcgctccatcaagaagagcgacttcgcggagctggtattcgtgcagggcaagattcggaataccaagtacgagaaggacggccagacggtctacgggaccgacttcattgccgataaggtggattatctggacaccaaggcaccaggcgggtcaaatcaggaataagggcacattgccccggcgtgagtcggggcaatcccgcaaggagggtgaatgaatcggacgtttgaccggaaggcatacaggcaagaactgatcgacgcggggttttccgccgaggatgccgaaaccatcgcaagccgcaccgtcatgcgtgcgccccgcgaaaccttccagtccgtcggctcgatggtccagcaagctacggccaagatcgagcgcgacagcgtgcaactggctccccctgccctgcccgcgccatcggccgccgtggagcgttcgcgtcgtctcgaacaggaggcggcaggtttggcgaagtcgatgaccatcgacacgcgaggaactatgacgaccaagaagcgaaaaaccgccggcgaggacctggcaaaacaggtcagcgaggccaagcaggccgcgttgctgaaacacacgaagcagcagatcaaggaaatgcagctttccttgttcgatattgcgccgtggccggacacgatgcgagcgatgccaaacgacacggcccgctctgccctgttcaccacgcgcaacaagaaaatcccgcgcgaggcgctgcaaaacaaggtcattttccacgtcaacaaggacgtgaagatcacctacaccggcgtcgagctgcgggccgacgatgacgaactggtgtggcagcaggtgttggagtacgcgaagcgcacccctatcggcgagccgatcaccttcacgttctacgagctttgccaggacctgggctggtcgatcaatggccggtattacacgaaggccgaggaatgcctgtcgcgcctacaggcgacggcgatgggcttcacgtccgaccgcgttgggcacctggaatcggtgtcgctgctgcaccgcttccgcgtcctggaccgtggcaagaaaacgtcccgttgccaggtcctgatcgacgaggaaatcgtcgtgctgtttgctggcgaccactacacgaaattcatatgggagaagtaccgcaagctgtcgccgacggcccgacggatgttcgactatttcagctcgcaccgggagccgtacccgctcaagctggaaaccttccgcctcatgtgcggatcggattccacccgcgtgaagaagtggcgcgagcaggtcggcgaagcctgcgaagagttgcgaggcagcggcctggtggaacacgcctgggtcaatgatgacctggtgcattgcaaacgctagggccttgtggggtcagttccggctgggggttcagcagccagcgctttactggcatttcaggaacaagcgggcactgctcgacgcacttgcttcgctcagtatcgctcgggacgcacggcgcgctctacgaactgccgataaacagaggattaaaattgacaattgtgattaaggctcagattcgacggcttggagcggccgacgtgcaggatttccgcgagatccgattgtcggccctgaagaaagctccagagatgttcgggtccgtttacgagcacgaggagaaaaagcccatggaggcgttcgctgaacggttgcgagatgccgtggcattcggcgcctacatcgacggcgagatcattgggctgtcggtcttcaaacaggaggacggccccaaggacgctcacaaggcgcatctgtccggcgttttcgtggagcccgaacagcgaggccgaggggtcgccggtatgctgctgcgggcgttgccggcgggtttattgctcgtgatgatcgtccgacagattccaacgggaatctggtggatgcgcatcttcatcctcggcgcacttaatatttcgctattctggagcttgttgtttatttcggtctaccgcctgccgggcggggtcgcggcgacggtaggcgctgtgcagccgctgatggtcgtgttcatctctgccgctctgctaggtagcccgatacgattgatggcggtcctgggggctatttgcggaactgcgggcgtggcgctgttggtgttgacaccaaacgcagcgctagatcctgtcggcgtcgcagcgggcctggcgggggcggtttccatggcgttcggaaccgtgctgacccgcaagtggcaacctcccgtgcctctgctcacctttaccgcctggcaactggcggccggaggacttctgctcgttccagtagctttagtgtttgatccgccaatcccgatgcctacaggaaccaatgttctcggcctggcgtggctcggcctgatcggagcgggtttaacctacttcctttggttccgggggatctcgcgactcgaacctacagttgtttccttactgggctttctcagcccccgagcgcttagtgggaatttgtaccccttatcgaaccgggagcacaggatgacgcctaacaattcattcaagccgacaccgcttcgcggcgcggcttaattcaggagttaaacatcatgagggaagcggtgatcgccgaagtatcgactcaactatcagaggtagttggcgtcatcgagcgccatctcgaaccgacgttgctggccgtacatttgtacggctccgcagtggatggcggcctgaagccacacagtgatattgatttgctggttacggtgaccgtaaggcttgatgaaacaacgcggcgagctttgatcaacgaccttttggaaacttcggcttcccctggagagagcgagattctccgcgctgtagaagtcaccattgttgtgcacgacgacatcattccgtggcgttatccagctaagcgcgaactgcaatttggagaatggcagcgcaatgacattcttgcaggtatcttcgagccagccacgatcgacattgatctggctatcttgctgacaaaagcaagagaacatagcgttgccttggtaggtccagcggcggaggaactctttgatccggttcctgaacaggatctatttgaggcgctaaatgaaaccttaacgctatggaactcgccgcccgactgggctggcgatgagcgaaatgtagtgcttacgttgtcccgcatttggtacagcgcagtaaccggcaaaatcgcgccgaaggatgtcgctgccgactgggcaatggagcgcctgccggcccagtatcagcccgtcatacttgaagctaggcaggcttatcttggacaagaagatcgcttggcctcgcgcgcagatcagttggaagaatttgttcactacgtgaaaggcgagatcaccaaggtagtcggcaaataatgtctaacaattcgttcaagccgacgccgcttcgcggcgcggcttaactcaagcgttagagagctggggaagactatgcgcgatctgttgaaggtggttctaagcctcgtcttgcgatggcatttcgatccattcccattccgcgctcaagatggcttcccctcggcagttcatcagggctaaatcaatctagccgacttgtccggtgaaatgggctgcactccaacagaaacaatcaaacaaacatacacagcgacttattcacacgagctca

SEQ ID NO: 71 - protein, 8 aa, Artificial sequence
  ORFA Reference Protein 1
LNYVVVEK

SEQ ID NO: 72 - protein, 14 aa, Artificial sequence
  ORFA Reference Protein 2
FGALGGFISQQAER

SEQ ID NO: 73 - protein, 39 aa, Artificial sequence
  ORFA Reference Protein 3
AEIAGGSAPAPAAAAPAPAAAAPAPAAPAPAVSSELLEK

SEQ ID NO: 74 - protein, 17 aa, Artificial sequence
  ORFA Reference Protein 4
AAPAAAAPAVSNELLEK

SEQ ID NO: 75 - protein, 18 aa, Artificial sequence
  ORFA Reference Protein 5
IVQHRPVPQDKPFYITLR

SEQ ID NO: 76 - protein, 8 aa, Artificial sequence
  ORFA Reference Protein 6
IFVEFGPK

SEQ ID NO: 77 - protein, 24 aa, Artificial sequence
  apo form of pantetheinylation sites 2-9
TGYETDMIESDMELETELGIDSIK

SEQ ID NO: 78 - protein, 24 aa, Artificial sequence
  apo form of pantetheinylation site 1
TGYETDMIEADMELETELGIDSIK
